(19) United States
(12) Patent Application Publication
(10) Pub. No.: US 2013/0035515 A1
(43) Pub. Date: Feb. 7, 2013

(54) LIGNOCELLULOSIC HYDROLYSATES AS FEEDSTOCKS FOR ISOBUTANOL FERMENTATION

(71) Applicants: Ian David Dobson, London (GB); Arthur Leo Kruckeberg, Wilmington, DE (US)

(72) Inventors: Ian David Dobson, London (GB); Arthur Leo Kruckeberg, Wilmington, DE (US)

(73) Assignee: BUTAMAX(TM) ADVANCED BIOFUELS LLC, Wilmington, DE (US)

(21) Appl. No.: 13/525,032

(22) Filed: Jun. 15, 2012

Related U.S. Application Data
(60) Provisional application No. 61/498,209, filed on Jun. 17, 2011.

(51) Int. Cl. C12P 7/16; C12N 9/00; C07C 31/12

(52) U.S. Cl. 568/840; 435/160; 435/183

(57) ABSTRACT

The invention relates generally to the field of industrial microbiology and butanol production from sources of 5-carbon sugars such as lignocellulosic hydrolysates. More specifically, the invention relates to the use of an xylulose or xylulose-5-phosphate-producing enzyme and micro-aerobic or anaerobic conditions to increase butanol production from such sugars and recovery of said butanol through ins situ product recovery methods.

### CROSS-REFERENCE TO RELATED APPLICATIONS

[0001] This application is related to and claims the benefit of priority of U.S. Provisional Patent Application No. 61/498,209, filed Jun. 17, 2011. The contents of the referenced application are herein incorporated by reference in their entirety.

### REFERENCE TO SEQUENCE LISTING SUBMITTED ELECTRONICALLY

[0002] The content of the electronically submitted sequence listing in ASCII text file (Name: 20120615_CL5194USNP_SeqList.txt, Size: 1,164,851 bytes, and Date of Creation: Jun. 14, 2012) filed with the application is incorporated herein by reference in its entirety.

### FIELD OF THE INVENTION

[0003] The invention relates generally to the field of industrial microbiology and butanol production. More specifically, the invention relates to the use of microbes to convert 5-carbon sugars, including the 5-carbon sugars in hydrolysates of lignocellulosic biomass, to butanol as well as processes for recovering butanol from fermentation in the presence of mixed sugars.

### BACKGROUND OF THE INVENTION

[0004] Butanol is an important industrial chemical with a variety of applications, including use as a fuel additive, as a feedstock chemical in the plastics industry, and as a food-grade extractant in the food and flavor industry. Accordingly, there is a high demand for butanol, as well as for efficient and environmentally friendly production methods.

[0005] Production of butanol utilizing fermentation by microorganisms is one such environmentally friendly production method. A number of feedstocks can be used for such fermentative products. Among these are hydrolysates of lignocellulosic biomass, including corn cob, corn stover, switchgrass, bagasse, and wood waste. However, lignocellulosic hydrolysates also contain compounds that inhibit the growth and metabolism of the microorganisms used for their fermentation, and in particular, inhibit the growth and metabolism of microorganisms that are capable of producing butanol.

[0006] The present invention satisfies the current need to improve the production of butanol from such lignocellulosic hydrolysates by providing methods to efficiently convert 5-carbon sugars, obtainable from the lignocellulosic hydrolysates, to butanol as well as processes for recovering butanol from fermentation in the presence of mixed sugars.

### BRIEF SUMMARY OF THE INVENTION

[0007] The invention relates generally to the methods and compositions for butanol production from mixed sources of 5-carbon sugars and six-carbon sugars such as lignocellulosic hydrolysates and improved butanol production from said sugars with in situ product recovery methods. More specifically, the invention relates to the use of an xylulose or xylulose-5-phosphate-producing enzyme and micro-aerobic or anaerobic conditions to increase butanol production.

[0008] In some embodiments, a method for producing butanol comprises (a) providing a composition comprising (i) a microorganism capable of producing butanol and (ii) an enzyme or combination of enzymes capable of converting a 5-carbon sugar to xylulose or xylulose-5-phosphate; (b) contacting the composition with a carbon substrate comprising mixed sugars; and (c) culturing the microorganism under conditions of limited oxygen utilization, whereby butanol is produced.

### BRIEF DESCRIPTION OF THE DRAWINGS/FIGURES

[0009] The various embodiments of the invention can be more fully understood from the following detailed description, the figures, and the accompanying sequence descriptions, which form a part of this application.

[0010] FIG. 1: Growth on corn cob hydrolysate. Growth was monitored by packed cell volume using PCV tubes according to the manufacturer's instructions (TPP, Trasadingen, Switzerland). Results of triplicate flasks are shown. The isobutanologen (PNY1504, dashed lines) was grown in 0.5×LCH. The ethanologen (solid lines) was grown in 1×LCH.

[0011] FIG. 2: Consumption of glucose and production of isobutanol and glycerol by PNY1504. The results were measured over 148 hours, and metabolites were determined using HPLC.

[0012] FIG. 3: Consumption of glucose and production of ethanol and glycerol by CEN.PK113-7D. The results were measured over 148 hours, and metabolites were determined using HPLC.

[0013] FIG. 4: Fermentation of glucose to isobutanol by PNY1504. Profiles of glucose consumption (Glc), growth (Biomass, by Packed Cell Volume), and isobutanol production (Iso), in the presence (+AA; solid lines) or absence (−AA; dotted lines) of antimycin A are shown.

[0014] FIG. 5: Fermentation of xylose to isobutanol by PNY1504 in the presence of xylose isomerase. Profiles of xylose (Xyl) and xylulose (Xls) concentrations, growth (Biomass, by Packed Cell Volume), and isobutanol production (Iso), in the presence (+AA; solid lines) or absence (−AA; dotted lines) of antimycin A are shown.

[0015] FIG. 6: Profiles of glucose and xylose in lignocellulosic hydrolysate during fermentation to isobutanol. Cultures were either treated (solid line) or not treated (dotted lines) with antimycin A, and supplied (closed symbols) or not supplied (open symbols) with xylose isomerase.

[0016] FIG. 7: Isobutanol effective titers produced during fermentation of lignocellulosic hydrolysate. Cultures were either treated (solid line) or not (dotted lines) with antimycin A, and supplied (closed symbols) or not (open symbols) with xylose isomerase.

### DETAILED DESCRIPTION OF THE INVENTION

[0017] Unless defined otherwise, all technical and scientific terms used herein have the same meaning as commonly understood by one of ordinary skill in the art to which this invention belongs. In case of conflict, the present application including the definitions will control. Unless otherwise required by context, singular terms shall include pluralities and plural terms shall include the singular. All publications, patents and other references' mentioned herein are incorporated by reference in their entireties for all purposes.

[0018] Although methods and materials similar or equivalent to those disclosed herein can be used in practice or testing of the present invention, suitable methods and materials are disclosed below. The materials, methods, and examples are illustrative only and are not intended to be limiting. Other features and advantages of the invention will be apparent from the detailed description and from the claims.

[0019] In order to further define this invention, the following terms, abbreviations and definitions are provided.

[0020] As used herein, the terms “comprises,” “comprising,” “includes,” “including,” “has,” “having,” “contains,” or “containing,” or any other variation thereof, are intended to be non-exclusive or open-ended. For example, a composition, a mixture, a process, a method, an article, or an apparatus that comprises a list of elements is not necessarily limited to only those elements but can include other elements not expressly listed or inherent to such composition, mixture, process, method, article, or apparatus. Further, unless expressly stated to the contrary, “or” refers to an inclusive or and not to an exclusive or. For example, a condition A or B is satisfied by any one of the following: A is true (or present) and B is false (or not present), A is false (or not present) and B is true (or present), and both A and B are true (or present).

[0021] Also, the indefinite articles “a” and “an” preceding an element or component of the invention are intended to be nonrestrictive regarding the number of instances, i.e., occurrences, of the element or component. Therefore “a” or “an” should be read to include one or at least one, and the singular word form of the element or component also includes the plural unless the number is obviously meant to be singular.

[0022] The term “invention” or. “present invention” as used herein is a non-limiting term and is not intended to refer to any single embodiment of the particular invention but encompasses all possible embodiments as disclosed in the application.

[0023] As used herein, the term “about” modifying the quantity of an ingredient or reactant employed refers to variation in the numerical quantity that can occur, for example, through typical measuring and liquid handling procedures used for making concentrates or use solutions in the real world; through inadvertent error in these procedures; through differences in the manufacture, source, or purity of the ingredients employed to make the compositions or to carry out the methods; and the like. The term “about” also encompasses amounts that differ due to different equilibrium conditions for a composition resulting from a particular initial mixture. Whether or not modified by the term “about,” the claims include equivalents to the quantities. In one embodiment, the term “about” means within 10% of the reported numerical value, preferably within 5% of the reported numerical value.

[0024] “Biomass” as used herein refers to a natural product containing a hydrolysable polysaccharide or carbohydrate that provides a fermentable sugar, including any cellulosic or lignocellulosic material and materials comprising cellulose, and optionally further comprising hemicellulose, lignin, starch, oligosaccharides, disaccharides, and/or monosaccharides. Biomass can also comprise additional components, such as protein and/or lipids. Biomass can be derived from a single source, or biomass can comprise a mixture derived from more than one source. For example, biomass can comprise a mixture of corn cobs and corn stover, or a mixture of grass stems and leaves. Biomass includes, but is not limited to, bioenergy crops, agricultural residues, municipal solid waste, industrial solid waste, sludge from paper manufacture, yard waste, wood, and forestry waste. Examples of biomass include, but are not limited to, corn grain, corn cobs, agricultural crop residues such as corn husks, corn stover, grasses, wheat, rye, wheat straw, barley, barley straw, hay, rice straw, switchgrass, waste paper, sugar cane bagasse, sorghum, soy, components obtained from milling of grains, trees, branches, roots, leaves, wood chips, sawdust, shrubs and bushes, vegetables, fruits, flowers, animal manure, municipal wastes and mixtures thereof.

[0025] “Butanol” as used herein refers with specificity to the butanol isomers 1-butanol (1-BuOH), 2-butanol (2-BuOH), isobutanol (iBuOH), and/or tert-butanol (t-BuOH), either individually or as mixtures thereof.

[0026] “Fermentable carbon source” as used herein means a carbon substrate from biomass capable of being metabolized by the microorganisms disclosed herein. Suitable fermentable carbon sources include, but are not limited to, monosaccharides, such as glucose or fructose, xylose and arabinose; disaccharides, such as maltose, lactose or sucrose; oligosaccharides; polysaccharides, such as starch or cellulose; one carbon substrates; and mixtures thereof.

[0027] “Feedstock” as used herein means a product containing a fermentable carbon source. Suitable feedstocks include, but are not limited to, rye, wheat, corn, cane, stover, switchgrass, bagasse and mixtures thereof.

[0028] “Fermentation broth” as used herein means the mixture of water, sugars (fermentable carbon sources), dissolved solids, microorganisms producing alcohol, product alcohol and all other constituents of the material held in the fermentation vessel in which product alcohol is being made by the reaction of sugars to alcohol, water and carbon dioxide (CO₂) by the microorganisms present. From time to time, as used herein the term “fermentation medium” and “fermented mixture” can be used synonymously with “fermentation broth”.

[0029] The term “carbon substrate” refers to a carbon source from biomass capable of being metabolized by the microorganisms and cells disclosed herein. Non-limiting examples of carbon substrates are provided herein and include, but are not limited to, monosaccharides, oligosaccharides, polysaccharides, ethanol, lactate, succinate, glycerol, carbon dioxide, methanol, glucose, fructose, sucrose, xylose, arabinose, dextrose, or mixtures thereof.

[0030] The term “effective titer” as used herein, refers to the total amount of a particular alcohol (e.g., butanol) produced by fermentation per liter of fermentation medium.

[0031] The term “separation” as used herein is synonymous with “recovery” and refers to removing a chemical compound from an initial mixture to obtain the compound in greater purity or at a higher concentration than the purity or concentration of the compound in the initial mixture.

[0032] The term “aqueous phase,” as used herein, refers to the aqueous phase of a biphasic mixture obtained by contacting a fermentation broth with a water-immiscible organic extractant. In an embodiment of a process described herein that includes fermentative extraction, the term “fermentation broth” then specifically refers to the aqueous phase in biphasic fermentative extraction.

[0033] The term “organic phase,” as used herein, refers to the non-aqueous phase of a biphasic mixture obtained by contacting a fermentation broth with a water-immiscible organic extractant.

[0034] The term “polynucleotide” is intended to encompass a singular nucleic acid as well as plural nucleic acids, and refers to a nucleic acid molecule or construct, e.g., messenger RNA (mRNA) or plasmid DNA (pDNA). A polynucleotide can contain the nucleotide sequence of the full-length cDNA sequence, or a fragment thereof, including the untranslated 5′ and 3′ sequences and the coding sequences. The polynucleotide can be composed of any polyribonucleotide or polydeoxyribonucleotide, which can be unmodified RNA or DNA or modified RNA or DNA. For example, polynucleotides can be composed of single- and double-stranded DNA, DNA that is a mixture of single- and double-stranded regions, single- and double-stranded RNA, and RNA that is mixture of single- and double-stranded regions, hybrid molecules comprising DNA and RNA that can be single-stranded or, more typically, double-stranded or a mixture of single- and double-stranded regions. “Polynucleotide” embraces chemically, enzymatically, or metabolically modified forms.

[0035] A polynucleotide sequence can be referred to as “isolated,” in which it has been removed from its native environment. For example, a heterologous polynucleotide encoding a polypeptide or polypeptide fragment having enzymatic activity (e.g. the ability to convert a substrate to xylulose) contained in a vector is considered isolated for the purposes of the present invention. Further examples of an isolated polynucleotide include recombinant polynucleotides maintained in heterologous host cells or purified (partially or substantially) polynucleotides in solution. Isolated polynucleotides or nucleic acids according to the present invention further include such molecules produced synthetically. An isolated polynucleotide fragment in the form of a polymer of DNA can be comprised of one or more segments of cDNA, genomic DNA, or synthetic DNA.

[0036] The term “gene” refers to a nucleic acid fragment that is capable of being expressed as a specific protein, optionally including regulatory sequences preceding (5′ non-coding sequences) and following (3′ non-coding sequences) the coding sequence.

[0037] As used herein the term “coding region” refers to a DNA sequence that codes for a specific amino acid sequence. “Suitable regulatory sequences” refer to nucleotide sequences located upstream (5′ non-coding sequences), within, or downstream (3′ non-coding sequences) of a coding sequence that influence the transcription, RNA processing or stability, or translation of the associated coding sequence. Regulatory sequences can include promoters, translation leader sequences, introns, polyadenylation recognition sequences, RNA processing sites, effector binding sites and stem-loop structures.

[0038] As used herein, the term “polypeptide” is intended to encompass a singular “polypeptide” as well as plural “polypeptides” and refers to a molecule composed of monomers (amino acids) linearly linked by amide bonds (also known as peptide bonds). The term “polypeptide” refers to any chain or chains of two or more amino acids, and does not refer to a specific length of the product. Thus, “peptides,” “dipeptides,” “tripeptides,” “oligopeptides,” “protein,” “amino acid chain,” or any other term used to refer to a chain or chains of two or more amino acids, are included within the definition of “polypeptide,” and the term “polypeptide” can be used instead of, or interchangeably with, any of these terms. A polypeptide can be derived from a natural biological source or produced by recombinant technology, but is not necessarily translated from a designated nucleic acid sequence. It can be generated in any manner, including by chemical synthesis.

[0039] By an “isolated” polypeptide or a fragment, variant, or derivative thereof is intended a polypeptide that is not in its natural milieu. No particular level of purification is required. For example, an isolated polypeptide can be removed from its native or natural environment. Recombinantly produced polypeptides and proteins expressed in host cells are considered isolated for purposes of the invention, as are native or recombinant polypeptides which have been separated, fractionated, or partially or substantially purified by any suitable technique.

[0040] As used herein, “native” refers to the form of a polynucleotide, gene, or polypeptide as found in nature with its own regulatory sequences, if present.

[0041] As used herein, “endogenous” refers to the native form of a polynucleotide, gene or polypeptide in its natural location in the organism or in the genome of an organism. “Endogenous polynucleotide” includes a native polynucleotide in its natural location in the genome of an organism. “Endogenous gene” includes a native gene in its natural location in the genome of an organism. “Endogenous polypeptide” includes a native polypeptide in its natural location in the organism.

[0042] As used herein, “heterologous” refers to a polynucleotide, gene, or polypeptide not normally found in the host organism but that is introduced into the host organism. “Heterologous polynucleotide” includes a native coding region, or portion thereof, that is reintroduced into the source organism in a form that is different from the corresponding native polynucleotide. “Heterologous gene” includes a native coding region, or portion thereof, that is reintroduced into the source organism in a form that is different from the corresponding native gene. For example, a heterologous gene can include a native coding region that is a portion of a chimeric gene including non-native regulatory regions that is reintroduced into the native host. “Heterologous polypeptide” includes a native polypeptide that is reintroduced into the source organism in a form that is different from the corresponding native polypeptide.

[0043] As used herein, the term “modification” refers to a change in a polynucleotide disclosed herein that results in altered activity of a polypeptide encoded by the polynucleotide, as well as a change in a polypeptide disclosed herein that results in altered activity of the polypeptide. Such changes can be made by methods well known in the art, including, but not limited to, deleting, mutating (e.g., spontaneous mutagenesis, random mutagenesis, mutagenesis caused by mutator genes, or transposon mutagenesis), substituting, inserting, altering the cellular location, altering the state of the polynucleotide or polypeptide (e.g., methylation, phosphorylation or ubiquitination), removing a cofactor, chemical modification, covalent modification, irradiation with UV or X-rays, homologous recombination, mitotic recombination, promoter replacement methods, and/or combinations thereof. Guidance in determining which nucleotides or amino acid residues can be modified, can be found by comparing the sequence of the particular polynucleotide or polypeptide with that of homologous polynucleotides or polypeptides, e.g., yeast or bacterial, and maximizing the number of modifications made in regions of high homology (conserved regions) or consensus sequences.

[0044] As used herein, the term “variant” refers to a polypeptide differing from a specifically recited polypeptide of the invention by amino acid insertions, deletions, mutations, and substitutions, created using, e.g., recombinant DNA techniques, such as mutagenesis. Guidance in determining which amino acid residues can be replaced, added, or deleted without abolishing activities of interest, can be found by comparing the sequence of the particular polypeptide with that of homologous polypeptides, e.g., yeast or bacterial, and minimizing the number of amino acid sequence changes made in regions of high homology (conserved regions) or by replacing amino acids with consensus sequences.

[0045] Alternatively, recombinant polynucleotide variants encoding these same or similar polypeptides can be synthesized or selected by making use of the “redundancy” in the genetic code. Various codon substitutions, such as silent changes which produce various restriction sites, can be introduced to optimize cloning into a plasmid or viral vector for expression. Mutations in the polynucleotide sequence can be reflected in the polypeptide or domains of other peptides added to the polypeptide to modify the properties of any part of the polypeptide.

[0046] Amino acid “substitutions” can be the result of replacing one amino acid with another amino acid having similar structural and/or chemical properties, i.e., conservative amino acid replacements, or they can be the result of replacing one amino acid with an amino acid having different structural and/or chemical properties, i.e., non-conservative amino acid replacements. “Conservative” amino acid substitutions can be made on the basis of similarity in polarity, charge, solubility, hydrophobicity, hydrophilicity, or the amphipathic nature of the residues involved. For example, nonpolar (hydrophobic) amino acids include alanine, leucine, isoleucine, valine, proline, phenylalanine, tryptophan, and methionine; polar neutral amino acids include glycine, serine, threonine, cysteine, tyrosine, asparagine, and glutamine; positively charged (basic) amino acids include arginine, lysine, and histidine; and negatively charged (acidic) amino acids include aspartic acid and glutamic acid. Alternatively, “non-conservative” amino acid substitutions can be made by selecting the differences in polarity, charge, solubility, hydrophobicity, hydrophilicity, or the amphipathic nature of any of these amino acids. “Insertions” or “deletions” can be within the range of variation as structurally or functionally tolerated by the recombinant proteins. The variation allowed can be experimentally determined by systematically making insertions, deletions, or substitutions of amino acids in a polypeptide molecule using recombinant DNA techniques and assaying the resulting recombinant variants for activity.

[0047] The term “promoter” refers to a DNA sequence capable of controlling the transcription of a coding sequence or functional RNA. In general, a coding sequence is located 3′ to a promoter sequence. Promoters can be derived in their entirety from a native gene, or be composed of different elements derived from different promoters found in nature, or even comprise synthetic DNA segments. It is understood by those skilled in the art that different promoters can direct the expression of a gene in different host cell types, or at different stages of development, or in response to different environmental or physiological conditions. Promoters which cause a gene to be expressed in most cell types at most times are commonly referred to as “constitutive promoters.” It is further recognized that since in most cases the exact boundaries of regulatory sequences have not been completely defined, DNA fragments of different lengths can have identical promoter activity.

[0048] The term “operably linked” refers to the association of nucleic acid sequences on a single nucleic acid fragment so that the function of one is affected by the other. For example, a promoter is operably linked with a coding sequence when it is capable of effecting the expression of that coding sequence (i.e., that the coding sequence is under the transcriptional control of the promoter). Coding sequences can be operably linked to regulatory sequences in sense or antisense orientation.

[0049] The term “expression,” as used herein, refers to the transcription and stable accumulation of sense (mRNA) or antisense RNA derived from the nucleic acid fragment of the invention. Expression can also refer to translation of mRNA into a polypeptide.

[0050] The term “overexpression,” as used herein, refers to an increase in the level of nucleic acid or protein in a host cell. Thus, overexpression can result from increasing the level of transcription or translation of an endogenous sequence in a host cell or can result from the introduction of a heterologous sequence into a host cell. Overexpression can also result from increasing the stability of a nucleic acid or protein sequence.

[0051] The term “reduced activity and/or expression” of an endogenous protein such an enzyme can mean either a reduced specific catalytic activity of the protein (e.g. reduced activity) and/or decreased concentrations of the protein in the cell (e.g. reduced expression), while “deleted activity and/or expression” of an endogenous protein such an enzyme can mean either no or negligible specific catalytic activity of the enzyme (e.g. deleted activity) and/or no or negligible concentrations of the enzyme in the cell (e.g. deleted expression).

[0052] As used herein the term “transformation” refers to the transfer of a nucleic acid fragment into a host organism, resulting in genetically stable inheritance. Host organisms containing the transformed nucleic acid fragments are referred to as “transgenic” or “recombinant” or “transformed” organisms.

[0053] The terms “plasmid” and “vector” as used herein, refer to an extra-chromosomal element often carrying genes which are not part of the central metabolism of the cell, and usually in the form of circular double-stranded DNA molecules. Such elements can include be autonomously replicating sequences, genome integrating sequences, phage or nucleotide sequences, linear or circular, of a single- or double-stranded DNA or RNA, derived from any source, in which a number of nucleotide sequences have been joined or recombined into a unique construction which is capable of introducing a promoter fragment and coding region for a selected gene product along with appropriate 3′ untranslated sequence into a cell.

[0054] As used herein the term “codon degeneracy” refers to the nature in the genetic code permitting variation of the nucleotide sequence without affecting the amino acid sequence of an encoded polypeptide. The skilled artisan is well aware of the “codon-bias” exhibited by a specific host cell in usage of nucleotide codons to specify a given amino acid. Therefore, when synthesizing a gene for improved expression in a host cell, it is desirable to design the gene such that its frequency of codon usage approaches the frequency of preferred codon usage of the host cell.

[0055] The term “codon-optimized” as it refers to genes or coding regions of nucleic acid molecules for transformation of various hosts, refers to the alteration of codons in the genes or coding regions of the nucleic acid molecules to reflect the typical codon usage of the host organism without altering the polypeptide encoded by the DNA. Such optimization includes replacing at least one, or more than one, or a significant number, of codons with one or more synonymous codons that are more frequently used in the genes of that organism. Codon-optimized coding regions can be designed by various methods known to those skilled in the art including software packages such as “synthetic gene designer” (http://phenotype.biosci.umbc.edu/codon/sgd/index.php).

[0056] Deviations in the nucleotide sequence that comprise the codons encoding the amino acids of any polypeptide chain allow for variations in the sequence coding for the gene. Since each codon consists of three nucleotides, and the nucleotides comprising DNA are restricted to four specific bases, there are 64 possible combinations of nucleotides, 61 of which encode amino acids (the remaining three codons encode signals ending translation). The “genetic code” which shows which codons encode which amino acids is reproduced herein as Table 1. As a result, many amino acids are designated by more than one codon. For example, the amino acids alanine and proline are coded for by four triplets, serine and arginine by six, whereas tryptophan and methionine are coded by just one triplet. This degeneracy allows for DNA base composition to vary over a wide range without altering the amino acid sequence of the proteins encoded by the DNA.

TABLE 1
The Standard Genetic Code

| | T | C | A | G |
|---|---|---|---|---|
| T | TTT Phe (F) | TCT Ser (S) | TAT Tyr (Y) | TGT Cys (C) |
| | TTC Phe (F) | TCC Ser (S) | TAC Tyr (Y) | TGC |
| | TTA Leu (L) | TCA Ser (S) | TAA Ter | TGA Ter |
| | TTG Leu (L) | TCG Ser (S) | TAG Ter | TGG Trp (W) |
| C | CTT Leu (L) | CCT Pro (P) | CAT His (H) | CGT Arg (R) |
| | CTC Leu (L) | CCC Pro (P) | CAC His (H) | CGC Arg (R) |
| | CTA Leu (L) | CCA Pro (P) | CAA Gln (Q) | CGA Arg (R) |
| | CTG Leu (L) | CCG Pro (P) | CAG Gln (Q) | CGG Arg (R) |
| A | ATT Ile (I) | ACT Thr (T) | AAT Asn (N) | AGT Ser (S) |
| | ATC Ile (I) | ACC Thr (T) | AAC Asn (N) | AGC Ser (S) |
| | ATG Met | ACA Thr (T) | AAA Lys (K) | AGA Arg (R) |
| | (M) | ACG Thr (T) | AAG Lys (K) | AGG Arg (R) |
| G | GTT Val (V) | GCT Ala (A) | GAT Asp (D) | GGT Gly (G) |
| | GTC Val (V) | GCC Ala (A) | GAC Asp (D) | GGC Gly (G) |
| | GTA Val (V) | GCA Ala (A) | GAA Glu (E) | GGA Gly (G) |
| | GTG Val (V) | GCG Ala (A) | GAG Glu (E) | GGG Gly (G) |

[0057] Given the large number of gene sequences available for a wide variety of animal, plant and microbial species, it is possible to calculate the relative frequencies of codon usage. Codon usage tables are readily available, for example, at the “Codon Usage Database” available at http://www.kazusa.or.jp/codon/ (visited Mar. 20, 2008), and these tables can be adapted in a number of ways. See Nakamura, Y., et al. Nucl. Acids Res. 28:292 (2000). Codon usage tables for yeast, calculated from GenBank Release 128.0 [15 Feb. 2002], are reproduced below as Table 2. This table uses mRNA nomenclature, and so instead of thymine (T) which is found in DNA, the tables use uracil (U) which is found in RNA. The Table has been adapted so that frequencies are calculated for each amino acid, rather than for all 64 codons.

TABLE 2
Codon Usage Table for Saccharomyces cerevisiae Genes

| | | | Frequency per |
|---|---|---|---|
| Amino Acid | Codon | Number | thousand |
| Phe | UUU | 170666 | 26.1 |
| Phe | UUC | 120510 | 18.4 |
| Leu | UUA | 170884 | 26.2 |
| Leu | UUG | 177573 | 27.2 |
| Leu | CUU | 80076 | 12.3 |
| Leu | CUC | 35545 | 5.4 |
| Leu | CUA | 87619 | 13.4 |
| Leu | CUG | 68494 | 10.5 |
| Ile | AUU | 196893 | 30.1 |
| Ile | AUC | 112176 | 17.2 |
| Ile | AUA | 116254 | 17.8 |
| Met | AUG | 136805 | 20.9 |
| Val | GUU | 144243 | 22.1 |
| Val | GUC | 76947 | 11.8 |
| Val | GUA | 76927 | 11.8 |
| Val | GUG | 70337 | 10.8 |
| Ser | UCU | 153557 | 23.5 |
| Ser | UCC | 92923 | 14.2 |
| Ser | UCA | 122028 | 18.7 |
| Ser | UCG | 55951 | 8.6 |
| Ser | AGU | 92466 | 14.2 |
| Ser | AGC | 63726 | 9.8 |
| Pro | CCU | 88263 | 13.5 |
| Pro | CCC | 44309 | 6.8 |
| Pro | CCA | 119641 | 18.3 |
| Pro | CCG | 34597 | 5.3 |
| Thr | ACU | 132522 | 20.3 |
| Thr | ACC | 83207 | 12.7 |
| Thr | ACA | 116084 | 17.8 |
| Thr | ACG | 52045 | 8.0 |
| Ala | GCU | 138358 | 21.2 |
| Ala | GCC | 82357 | 12.6 |
| Ala | GCA | 105910 | 16.2 |
| Ala | GCG | 40358 | 6.2 |
| Tyr | UAU | 122728 | 18.8 |
| Tyr | UAC | 96596 | 14.8 |
| His | CAU | 89007 | 13.6 |
| His | CAC | 50785 | 7.8 |
| Gln | CAA | 178251 | 27.3 |
| Gln | CAG | 79121 | 12.1 |
| Asn | AAU | 233124 | 35.7 |
| Asn | AAC | 162199 | 24.8 |
| Lys | AAA | 273618 | 41.9 |
| Lys | AAG | 201361 | 30.8 |
| Asp | GAU | 245641 | 37.6 |
| Asp | GAC | 132048 | 20.2 |
| Glu | GAA | 297944 | 45.6 |
| Glu | GAG | 125717 | 19.2 |
| Cys | UGU | 52903 | 8.1 |
| Cys | UGC | 31095 | 4.8 |
| Trp | UGG | 67789 | 10.4 |
| Arg | CGU | 41791 | 6.4 |
| Arg | CGC | 16993 | 2.6 |
| Arg | CGA | 19562 | 3.0 |
| Arg | CGG | 11351 | 1.7 |
| Arg | AGA | 139081 | 21.3 |
| Arg | AGG | 60289 | 9.2 |
| Gly | GGU | 156109 | 23.9 |
| Gly | GGC | 63903 | 9.8 |
| Gly | GGA | 71216 | 10.9 |
| Gly | GGG | 39359 | 6.0 |
| Stop | UAA | 6913 | 1.1 |
| Stop | UAG | 3312 | 0.5 |
| Stop | UGA | 4447 | 0.7 |

[0058] By utilizing this or similar tables, one of ordinary skill in the art can apply the frequencies to any given polypeptide sequence, and produce a nucleic acid fragment of a codon-optimized coding region which encodes the polypeptide, but which uses codons optimal for a given species.

[0059] Randomly assigning codons at an optimized frequency to encode a given polypeptide sequence can be done manually by calculating codon frequencies for each amino acid, and then assigning the codons to the polypeptide sequence randomly. Additionally, various algorithms and computer software programs are readily available to those of ordinary skill in the art. For example, the “EditSeq” function in the Lasergene Package, available from DNAstar, Inc., Madison, Wis., the backtranslation function in the Vector NTI Suite, available from InforMax, Inc., Bethesda, Md., and the “backtranslate” function in the GCG—Wisconsin Package, available from Accelrys, Inc., San Diego, Calif. In addition, various resources are publicly available to codon-optimize coding region sequences, e.g., the “backtranslation” function at http://www.entelechon.com/bioinformatics/backtranslation.php?lang=eng (visited Apr. 15, 2008) and the “backtranseq” function available at http://bioinfo.pbi.nrc.ca:8090/EMBOSS/index.html (visited Jul. 9, 2002). Constructing a rudimentary algorithm to assign codons based on a given frequency can also easily be accomplished with basic mathematical functions by one of ordinary skill in the art.

[0060] Codon-optimized coding regions can be designed by various methods known to those skilled in the art including software packages such as “synthetic gene designer” (http://phenotype.biosci.umbc.edu/codon/sgd/index.php).

[0061] A polynucleotide or nucleic acid fragment is “hybridizable” to another nucleic acid fragment, such as a cDNA, genomic DNA, or RNA molecule, when a single-stranded form of the nucleic acid fragment can anneal to the other nucleic acid fragment under the appropriate conditions of temperature and solution ionic strength. Hybridization and washing conditions are well known and exemplified in Sambrook, J., Fritsch, E. F. and Maniatis, T. Molecular Cloning: A Laboratory Manual, 2^{nd} ed., Cold Spring Harbor Laboratory: Cold Spring Harbor, N.Y. (1989), particularly Chapter 11 and Table 11.1 therein (entirely incorporated herein by reference). The conditions of temperature and ionic strength determine the “stringency” of the hybridization. Stringency conditions can be adjusted to screen for moderately similar fragments (such as homologous sequences from distantly related organisms), to highly similar fragments (such as genes that duplicate functional enzymes from closely related organisms). Post-hybridization washes determine stringency conditions. One set of preferred conditions uses a series of washes starting with 6×SSC, 0.5% SDS at room temperature for 15 min, then repeated with 2×SSC, 0.5% SDS at 45° C. for 30 min, and then repeated twice with 0.2×SSC, 0.5% SDS at 50° C. for 30 min. A more preferred set of stringent conditions uses higher temperatures in which the washes are identical to those above except for the temperature of the final two 30 min washes in 0.2×SSC, 0.5% SDS was increased to 60° C. Another preferred set of highly stringent conditions uses two final washes in 0.1×SSC, 0.1% SDS at 65° C. An additional set of stringent conditions include hybridization at 0.1×SSC, 0.1% SDS, 65° C. and washes with 2×SSC, 0.1% SDS followed by 0.1×SSC, 0.1% SDS, for example.

[0062] Hybridization requires that the two nucleic acids contain complementary sequences, although depending on the stringency of the hybridization, mismatches between bases are possible. The appropriate stringency for hybridizing nucleic acids depends on the length of the nucleic acids and the degree of complementarity, variables well known in the art. The greater the degree of similarity or homology between two nucleotide sequences, the greater the value of Tm for hybrids of nucleic acids having those sequences. The relative stability (corresponding to higher Tm) of nucleic acid hybridizations decreases in the following order: RNA:RNA, DNA:RNA, DNA:DNA. For hybrids of greater than 100 nucleotides in length, equations for calculating Tm have been derived (see Sambrook et al., supra, 9.50-9.51). For hybridizations with shorter nucleic acids, i.e., oligonucleotides, the position of mismatches becomes more important, and the length of the oligonucleotide determines its specificity (see Sambrook et al., supra, 11.7-11.8). In one embodiment the length for a hybridizable nucleic acid is at least about 10 nucleotides. Preferably a minimum length for a hybridizable nucleic acid is at least about 15 nucleotides; more preferably at least about 20 nucleotides; and most preferably the length is at least about 30 nucleotides. Furthermore, the skilled artisan will recognize that the temperature and wash solution salt concentration can be adjusted as necessary according to factors such as length of the probe.

[0063] A “substantial portion” of an amino acid or nucleotide sequence is that portion comprising enough of the amino acid sequence of a polypeptide or the nucleotide sequence of a gene to putatively identify that polypeptide or gene, either by manual evaluation of the sequence by one skilled in the art, or by computer-automated sequence comparison and identification using algorithms such as BLAST (Altschul, S. F., et al., J. Mol. Biol., 215:403-410 (1993)). In general, a sequence of ten or more contiguous amino acids or thirty or more nucleotides is necessary in order to putatively identify a polypeptide or nucleic acid sequence as homologous to a known protein or gene. Moreover, with respect to nucleotide sequences, gene-specific oligonucleotide probes comprising 20-30 contiguous nucleotides can be used in sequence-dependent methods of gene identification (e.g., Southern hybridization) and isolation (e.g., in situ hybridization of bacterial colonies or bacteriophage plaques). In addition, short oligonucleotides of 12-bases can be used as amplification primers in PCR in order to obtain a particular nucleic acid fragment comprising the primers. Accordingly, a “substantial portion” of a nucleotide sequence comprises enough of the sequence to specifically identify and/or isolate a nucleic acid fragment comprising the sequence. The instant specification teaches the complete amino acid and nucleotide sequence encoding particular proteins. The skilled artisan, having the benefit of the sequences as reported herein, can now use all or a substantial portion of the disclosed sequences for purposes known to those skilled in this art. Accordingly, the instant invention comprises the complete sequences as provided herein, as well as substantial portions of those sequences as defined above.

[0064] The term “complementary” is used to describe the relationship between nucleotide bases that are capable of hybridizing to one another. For example, with respect to DNA, adenosine is complementary to thymine and cytosine is complementary to guanine.

[0065] The term “percent identity,” as known in the art, is a relationship between two or more polypeptide sequences or two or more polynucleotide sequences, as determined by comparing the sequences. In the art, “identity” also means the degree of sequence relatedness between polypeptide or polynucleotide sequences, as the case may be, as determined by the match between strings of such sequences. “Identity” and “similarity” can be readily calculated by known methods, including but not limited to those disclosed in: 1.) Computational Molecular Biology (Lesk, A. M., Ed.) Oxford University: NY (1988); 2.) Biocomputing: Informatics and Genome Projects (Smith, D. W., Ed.) Academic: NY (1993); 3.) Computer Analysis of Sequence Data, Part I (Griffin, A. M., and Griffin, H. G., Eds.) Humania: NJ (1994); 4.) Sequence Analysis in Molecular Biology (von Heinje, G., Ed.) Academic (1987); and 5.) Sequence Analysis Primer (Gribskov, M. and Devereux, J., Eds.) Stockton: NY (1991).

[0066] Preferred methods to determine identity are designed to give the best match between the sequences tested. Methods to determine identity and similarity are codified in publicly available computer programs. Sequence alignments and percent identity calculations can be performed using the MegAlign™ program of the LASERGENE bioinformatics computing suite (DNASTAR Inc., Madison, Wis.). Multiple alignment of the sequences is performed using the “Clustal method of alignment” which encompasses several varieties of the algorithm including the “Clustal V method of alignment” corresponding to the alignment method labeled Clustal V (disclosed by Higgins and Sharp, CABIOS. 5:151-153 (1989); Higgins, D. G. et al., Comput. Appl. Biosci., 8:189-191 (1992)) and found in the MegAlign™ program of the LASERGENE bioinformatics computing suite (DNASTAR Inc.). For multiple alignments, the default values correspond to GAP PENALTY=10 and GAP LENGTH PENALTY=10. Default parameters for pairwise alignments and calculation of percent identity of protein sequences using the Clustal method are KTUPLE=1, GAP PENALTY=3, WINDOW=5 and DIAGONALS SAVED=5. For nucleic acids these parameters are KTUPLE=2, GAP PENALTY=5, WINDOW=4 and DIAGONALS SAVED=4. After alignment of the sequences using the Clustal V program, it is possible to obtain a “percent identity” by viewing the “sequence distances” table in the same program. Additionally the “Clustal W method of alignment” is available and corresponds to the alignment method labeled Clustal W (described by Higgins and Sharp, CABIOS. 5:151-153 (1989); Higgins, D. G. et al., Comput. Appl. Biosci. 8:189-191 (1992)) and found in the MegAlign™ v6.1 program of the LASERGENE bioinformatics computing suite (DNASTAR Inc.). Default parameters for multiple alignment (GAP PENALTY=10, GAP LENGTH PENALTY=0.2, Delay Divergen Seqs(%)=30, DNA Transition Weight=0.5, Protein Weight Matrix=Gonnet Series, DNA Weight Matrix=IUB). After alignment of the sequences using the Clustal W program, it is possible to obtain a “percent identity” by viewing the “sequence distances” table in the same program.

[0067] It is well understood by one skilled in the art that many levels of sequence identity are useful in identifying polypeptides, from other species, wherein such polypeptides have the same or similar function or activity. Useful examples of percent identities include, but are not limited to: 55%, 60%, 65%, 70%, 75%, 80%, 85%, 90%, or 95%, or any integer percentage from 55% to 100% can be useful in describing the present invention, such as 55%, 56%, 57%, 58%, 59%, 60%, 61%, 62%, 63%, 64%, 65%, 66%, 67%, 68%, 69%, 70%, 71%, 72%, 73%, 74%, 75%, 76%, 77%, 78%, 79%, 80%, 81%, 82%, 83%, 84%, 85%, 86%, 87%, 88%, 89%, 90%, 91%, 92%, 93%, 94%, 95%, 96%, 97%, 98% or 99%. Suitable nucleic acid fragments not only have the above homologies but typically encode a polypeptide having at least 50 amino acids, preferably at least 100 amino acids, more preferably at least 150 amino acids, still more preferably at least 200 amino acids, and most preferably at least 250 amino acids.

[0068] The term “sequence analysis software” refers to any computer algorithm or software program that is useful for the analysis of nucleotide or amino acid sequences.

[0069] “Sequence analysis software” can be commercially available or independently developed. Typical sequence analysis software will include, but is not limited to: 1.) the GCG suite of programs (Wisconsin Package Version 9.0, Genetics Computer Group (GCG), Madison, Wis.); 2.) BLASTP, BLASTN, BLASTX (Altschul et al., J. Mol. Biol., 215:403-410 (1990)); 3.) DNASTAR (DNASTAR, Inc. Madison, Wis.); 4.) Sequencher (Gene Codes Corporation, Ann Arbor, Mich.); and 5.) the FASTA program incorporating the Smith-Waterman algorithm (W. R. Pearson, Comput. Methods Genome Res., [Proc. Int. Symp.](1994), Meeting Date 1992, 111-20. Editor(s): Suhai, Sandor. Plenum: New York, N.Y.). Within the context of this application it will be understood that where sequence analysis software is used for analysis, that the results of the analysis will be based on the “default values” of the program referenced, unless otherwise specified. As used herein “default values” will mean any set of values or parameters that originally load with the software when first initialized.

[0070] Standard recombinant DNA and molecular cloning techniques used here are well known in the art and are described by Sambrook, J., Fritsch, E. F. and Maniatis, T., Molecular Cloning: A Laboratory Manual, Second Edition, Cold Spring Harbor Laboratory Press, Cold Spring Harbor, N.Y. (1989) (hereinafter “Maniatis”); and by Silhavy, T. J., Bennan, M. L. and Enquist, L. W., Experiments with Gene Fusions, Cold Spring Harbor Laboratory Press, Cold Spring Harbor, N.Y. (1984); and by Ausubel, F. M. et al., Current Protocols in Molecular Biology, published by Greene Publishing Assoc. and Wiley-Interscience (1987). Additional methods used here are in Methods in Enzymology, Volume 194, Guide to Yeast Genetics and Molecular and Cell Biology (Part A, 2004, Christine Guthrie and Gerald R. Fink (Eds.), Elsevier Academic Press, San Diego, Calif.).

[0071] The genetic manipulations of cells disclosed herein can be performed using standard genetic techniques and screening and can be made in any cell that is suitable to genetic manipulation (Methods in Yeast Genetics, 2005, Cold Spring Harbor Laboratory Press, Cold Spring Harbor, N.Y., pp. 201-202).

### Sources of 5-Carbon Sugars

[0072] Hydrolysates of lignocellulosic biomass are a valuable feedstock for the production of biofuels that provide both 5- and 6-carbon sugars. However, these hydrolysates can contain compounds that are inhibitory to the growth and metabolism of microorganisms that are used to ferment the 5-carbon sugars. Thus, the amount of butanol that can be produced from lignocellulosic hydrolysates is limited because the 5-carbon sugars are not readily usable without certain genetic modifications and without some processing to ameliorate inhibitor activity. However, the methods described herein provide ways of increasing the yield of butanol from such lignocellulosic hydrolysates by allowing for the growth and metabolism of butanol-producing microorganisms and for the fermentation of 5-carbon sugars.

[0073] Biomass refers to any cellulosic or lignocellulosic material and includes materials comprising cellulose, and optionally further comprising hemicellulose, lignin, starch, oligosaccharides and/or monosaccharides. Biomass can also comprise additional components, such as protein and/or lipid. Biomass can be derived from a single source, or biomass can comprise a mixture derived from more than one source; for example, biomass can comprise a mixture of corn cobs and corn stover, or a mixture of grass and leaves. Biomass includes, but is not limited to, bioenergy crops, agricultural residues, municipal solid waste, industrial solid waste, sludge from paper manufacture, yard waste, wood and forestry waste. Examples of biomass include, but are not limited to, corn grain, corn cobs, crop residues such as corn husks, corn stover, grasses, wheat, wheat straw, barley, barley straw, hay, rice straw, switchgrass, waste paper, sugar cane bagasse, sorghum, soy, components obtained from milling of grains, trees, branches, roots, leaves, wood chips, sawdust, shrubs and bushes, vegetables, fruits, flowers, animal manure, agave, and mixtures thereof.

[0074] Fermentable sugars can be derived from such cellulosic or lignocellulosic biomass through processes of pretreatment and saccharification, as described, for example, in U.S. Pat. No. 7,781,191, which is herein incorporated by reference. By way of example, a relatively high concentration of biomass can be pretreated with a low concentration of ammonia relative to the dry weight of the biomass. Following the pretreatment, the biomass can be treated with a saccharification enzyme consortium to produce fermentable sugars. Thus, the pretreatment can comprise a) contacting biomass with an aqueous solution comprising ammonia to form a biomass-aqueous ammonia mixture, wherein the ammonia is present at a concentration at least sufficient to maintain alkaline pH of the biomass-aqueous ammonia mixture but wherein said ammonia is present at less than about 12 weight percent relative to dry weight of biomass, and further wherein the dry weight of biomass is at a high solids concentration of at least about 15 weight percent relative to the weight of the biomass-aqueous ammonia mixture; and b) contacting the product of step (a) with a saccharification enzyme consortium under suitable conditions, to produce fermentable sugars.

[0075] Ligriocellulosic hydrolysates and other sources of 5-carbon sugars can provide 5-carbon sugars and can provide 5-carbon sugars in combination with 6-carbon sugars or other carbon substrates which are suitable for fermentation. In some embodiments, the 5-carbon sugars are xylose. In some embodiments, the 5-carbon sugars are arabinose. In some embodiments, the 5-carbon sugars include both xylose and arabinose. The sources of 5-carbon sugars can also include other carbon substrates such as monosaccharides, polysaccharides, one-carbon substrates, two carbon substrates, and other carbon substrates. Hence it is contemplated that the source of carbon utilized in the present invention can encompass any number of carbons substrates in addition to the 5-carbon sugars.

[0076] In some embodiments, the lignocellulosic hydrolysate is present in the composition for fermentation at a particular concentration. For example, in some embodiments, the lignocellulosic hydrolysate is present at a concentration of at least about 5 g/L, 10 g/L, 15 g/L, 20 g/L, 25 g/L, 30 g/L, 35 g/L, 40 g/L, 45 g/L, 50 g/L, 55 g/L, 60 g/L, 65 g/L, 70 g/L, 75 g/L, 80 g/L, 85 g/L, 90 g/L, 95 g/L, 100 g/L, 110 g/L, 120 g/L, 130 g/L, 140 g/L, 150 g/L, 160 g/L, 170 g/L, 180 g/L, 190 g/L, or 200 g/L. In some embodiments, the lignocellulosic hydrolysate is present at a concentration of about 5-500 g/L, about 5-400 g/L, about 5-300 g/L, about 5-200 g/L, or about 5-150 g/L. In some embodiments, the lignocellulosic hydrolysate is present at a concentration of about 25-500 g/L, about 25-400 g/L, about 25-300 g/L, about 25-200 g/L, or about 25-150 g/L. In some embodiments, the lignocellulosic hydrolysate is present at a concentration of about 50-500 g/L, about 50-400 g/L, about 50-300 g/L, about 50-200 g/L, or about 50-150 g/L.

[0077] In addition, in some embodiments, the lignocellulosic hydrolysate is consumed at a particular rate. Thus, in some embodiments, asssuming 6 g/l cell mass like in corn and a TS level of 20% for straw gives C5 consumption at 0.44 g/l-h or a specific rate of 0.07 g C5/g cell hour.

[0078] In particular, 5-carbon sugars can be consumed from the lignocellulosic hydrolysate at a particular rate.

Production of Xylulose from Sources of 5-Carbon Sugars

[0079] Microorganisms that can be used according to the methods described herein can ferment xylulose via the pentose phosphate pathway. However, many sources of 5-carbon sugars, such a lignocellulosic hydrolysates, can contain 5-carbon sugars other than xylulose that cannot be directly fermented by the microorganisms. Therefore, the methods described herein provide enzymes that are capable of converting other 5-carbon sugars to D-xylulose and/or D-xylulose-5-P. For example, enzymes that can convert xylose or arabinose to xylulose are known to those of skill in the art. By way of example: xylose isomerase can convert xylose to D-xylulose; xylose reductase and xylitol dehydrogenase can convert xylose to D-xylulose; arabinose reductase, arabitol dehydrogenase, L-xylulose reductase, and xylitol dehydrogenase can convert arabinose to D-xylulose; arabinose isomerase, ribulokinase, and ribulose-phosphate-5-epimerase can convert arabinose to D-xylulose-5-P. In addition, aldose reductase, which can covert alditol to aldose is useful in converting arabinose and xylose into D-xylulose 5-P.

[0080] The enzyme or enzymes capable of converting other 5-carbon sugars to xylulose can be provided from an exogenous source or can be produced by recombinant microorganisms in the fermenting composition.

[0081] For example, xylulose-producing enzymes can be produced by any means known to those of skill in the art (including natural production, recombinant production and chemical synthesis), and a composition comprising the xylulose-producing enzymes can be added to butanol-producing microorganisms in order to ferment 5-carbon sugars. Xylulose-producing enzymes, such as xylose isomerase can be purchased from commercial sources, e.g., “Sweetzyme” produced by Novozyme.

[0082] Additionally, and/or alternatively, cells and/or microorganisms that express xylulose- and/or xylulose-5-P-producing enzymes can be added to the butanol-producing organisms in order to ferment 5-carbon sugars. The cells and/or microorganisms can be cells and/or microorganisms that convert 5-carbon sugars to xylulose and/or xylulose-5-P endogenously or can be cells and/or microorganisms that have been engineered to recombinantly produce xylulose- and/or xylulose-5-P-producing enzymes. Additionally, and/or alternatively, the butanol-producing microorganisms can be engineered to recombinantly produce xylulose- and/or D-xylulose-5-P-producing enzymes. Further, in the host cells of the invention, the expression of the araA, araB and araD enzymes, which provide for utilization of L-arabinose, combined with genetic modification that reduces unspecific aldose reductase activity, provide for efficient utilization of L-arabinose in the pentose-phosphate pathway (PPP). See e.g., U.S. Pat. No. 7,354,755, herein incorporated by reference. The genetic modification leading to the reduction of unspecific aldose reductase activity may be combined with any of the modifications increasing the flux of the pentose phosphate pathway and/or with any of the modifications increasing the specific xylulose kinase activity in the host cells as described herein. Thus, a host cell expressing araA, araB, and araD, comprising an additional genetic modification that reduces unspecific aldose reductase activity is specifically included in the invention. The genes expressing araA, araB and araD may be derived from E. coli or B. subtilis. Where the host cell is a yeast strain, in certain embodiments the yeast strain includes at least one arabinose transporter gene selected from the group consisting of GAL2, KmLAT1 and PgLAT2. The L-arabinose transporter with high affinity may be sourced from Kluyveromyces marxianus and Pichia guilliermondii (also known as Candida guilliermondii), respectively. Both Kluyveromyces marxianus and Pichia guilliermondii may be considered efficient utilizers of L-arabinose, which renders them a sources for cloning L-arabinose transporter genes. In certain embodiments the yeast strain further may overexpress a GAL2-encoded galactose permease. See also, U.S. Pat. No. 5,514,583, which is herein incorporated by reference. Other xylose utilizing strains include CP4(pZB5) (U.S. Pat. No. 5,514,583), ATCC31821/pZB5 (U.S. Pat. No. 6,566,107), 8b (US 20030162271; Mohagheghi et al., (2004) Biotechnol. Lett. 25; 321-325), and ZW658 (ATTCC #PTA-7858), which may be modified for butanol production from mixed sugars including xylose and glucose.

[0083] Thus, in order to improve butanol production, microorganisms can be engineered to express enzymes capable of producing xylulose and/or xylulose-5-P. The overall activity of xylulose- and/or xylulose-5-P-producing enzymes in a host cell can be increased by the introduction of heterologous nucleic acid and/or protein sequences or by mutation of endogenous nucleic acid and/or protein sequences. When a heterologous xylulose- and/or xylulose-5-P-producing enzyme gene or protein is introduced into a host cell, the enzymatic activity of the host cell is increased relative to the enzymatic activity in the absence of the heterologous nucleic acids or proteins. When an endogenous nucleic acid or protein is mutated in a host cell, the activity of the enzymes in the host cell is increased relative to the enzymatic activity in the absence of the mutation. In some embodiments, the rate of xylulose and/or xylulose-5-P production in a cell is increased relative to a wild-type yeast strain.

[0084] Xylulose- and/or D-xylulose-5-P-producing enzymes can be overexpressed individually or in combination in host strains. In some embodiments, xylose isomerase is overexpressed. In some embodiments, xylose reductase and xylitol dehydrogenase are overexpressed. In some embodiments, enzymes that produce xylulose and/or xylulose-5-P from arabinose are overexpressed. In some embodiments, xylose isomerase, xylose reductase, and xylitol dehydrogenase are overexpressed. In some embodiments, enzymes that convert xylose to xylulose and enzymes that convert arabinose to xylulose and/or xylulose-5-P are both overexpressed.

[0085] The introduction of xylulose- and/or xylulose-5-P-producing enzymes into a recombinant host cell can increase butanol production. In some embodiments of the methods described herein, a polynucleotide encoding a protein with the desired activity can be introduced into a cell using recombinant DNA technologies that are well known in the art. In some embodiments, the introduction of a polynucleotide encoding a protein with, for example, xylose isomerase, xylose reductase, or xylitol dehydrogenase activity results in improved isobutanol concentrations and increased specific isobutanol production rates.

[0086] Methods of making microorganisms that express xylulose-producing enzymes are known in the art. For example, International Publication No. WO 2009/109630, which is hereby incorporated by reference in its entirety, illustrates the production of pentose-sugar fermenting cells that express xylose isomerase. Additional examples of xylulose- and/or xylulose-5-P-producing enzyme genes and polypeptides that can be expressed in a host cell disclosed herein include, but are not limited to, those in Table 3 below, with sequences provided in attached Tables, herein incorporated by reference. Example xylose isomerase enzymes and source organisms for such polypeptides are disclosed in US20110318801A1. Examples of xylose isomerase and source organisms include, but are not limited those in Tables 4 and 5 below (e.g. SEQ ID NOs: 89-394) as well as SEQ ID NOs: 74, 75, and 395-399.

TABLE 3
Xylulose-Producing Enzymes.
Entire GenBank records are given in FASTA
format. Coding regions for the enzymes of
interest are given at the end of the header
line in parentheses

| | EC | |
|---|---|---|
| Enzyme | Number | SEQ ID NO |
| D-Xylulose | 1.1.1.9 | >gi\|3262\|emb\|X55392.1\| |
| reductase | | Pichia stipitis XYL2 gene for |
| | | xylitol dehydrogenase (319-1410) |
| | | TCTAGACCACCCTAAGTCGTCCCTATGTCGTATGTT |
| | | TGCCTCTACTACAAAGTTACTAGCAAATATCCGCAG |
| | | CAACAACAGCTGCCCTCTTCCAGCTTCTTAGTGTGT |
| | | TGGCCGAAAAGGCGCTTTCGGGCTCCAGCTTCTGTC |
| | | CTCTGCGGCTGCTGCACATAACGCGGGGACAATGA |
| | | CTTCTCCAGCTTTTATTATAAAAGGAGCCATCTCCT |
| | | CCAGGTGAAAAATTACGATCAACTTTTACTCTTTTC |
| | | CATTGTCTCTTGTGTATACTCACTTTAGTTTGTTTCA |
| | | ATCACCCCTAATACTCTTCACACAATTAAAATGACT |
| | | GCTAACCCTTCCTTGGTGTTGAACAAGATCGACGAC |
| | | ATTTCGTTCGAAACTTACGATGCCCCAGAAATCTCT |
| | | GAACCTACCGATGTCCTCGTCCAGGTCAAGAAAAC |
| | | CGGTATCTGTGGTTCCGACATCCACTTCTACGCCCA |
| | | TGGTAGAATCGGTAACTTCGTTTTGACCAAGCCAAT |
| | | GGTCTTGGGTCACGAATCCGCCGGTACTGTTGTCCA |
| | | GGTTGGTAAGGGTGTCACCTCTCTTAAGGTTGGTGA |
| | | CAACGTCGCTATCGAACCAGGTATTCCATCCAGATT |
| | | CTCCGACGAATACAAGAGCGGTCACTACAACTTGT |
| | | GTCCTCACATGGCCTTCGCCGCTACTCCTAACTCCA |
| | | AGGAAGGCGAACCAAACCCACCAGGTACCTTATGT |
| | | AAGTACTTCAAGTCGCCAGAAGACTTCTTGGTCAA |
| | | GTTGCCAGACCACGTCAGCTTGGAACTCGGTGCTCT |
| | | TGTTGAGCCATTGTCTGTTGGTGTCCACGCCTCCAA |
| | | GTTGGGTTCCGTTGCTTTCGGCGACTACGTTGCCGT |
| | | CTTTGGTGCTGGTCCTGTTGGTCTTTTGGCTGCTGCT |
| | | GTCGCCAAGACCTTCGGTGCTAAGGGTGTCATCGTC |
| | | GTTGACATTTTCGACAACAAGTTGAAGATGGCCAA |
| | | GGACATTGGTGCTGCTACTCACACCTTCAACTCCAA |
| | | GACCGGTGGTTCTGAAGAATTGATCAAGGCTTTCG |
| | | GTGGTAACGTGCCAAACGTCGTTTTGGAATGTACTG |
| | | GTGCTGAACCTTGTATCAAGTTGGGTGTTGACGCCA |
| | | TTGCCCCAGGTGGTCGTTTCGTTCAAGTTGGTAACG |
| | | CTGCTGGTCCAGTCAGCTTCCCAATCACCGTTTTCG |
| | | CCATGAAGGAATTGACTTTGTTCGGTTCTTTCAGAT |
| | | ACGGATTCAACGACTACAAGACTGCTGTTGGAATC |
| | | TTTGACACTAACTACCAAAACGGTAGAGAAAATGC |
| | | TCCAATTGACTTTGAACAATTGATCACCCACAGATA |
| | | CAAGTTCAAGGACGCTATTGAAGCCTACGACTTGG |
| | | TCAGAGCCGGTAAGGGTGCTGTCAAGTGTCTCATT |
| | | GACGGCCCTGAGTAAGTCAACCGCTTGGCTGGCCC |
| | | AAAGTGAACCAGAAACGAAAATGATTATCAAATAG |
| | | CTTTATAGACCTTTATCGAAATTTATGTAAACTAAT |
| | | AGAAAAGACAGTGTAGAAGTTATATGGTTGCATCA |
| | | CGTGAGTTTCTTGAATTCTTGAAAGTGAAGTCTTGG |
| | | TCGGAACAAACAAACAAAAAAATATTTTCAGCAAG |
| | | AGTTGATTTCTTTTCTGGAGATTTTGGTAATTGACA |
| | | GAGAACCCCTTTCTGCTATTGCCATCTAAACATCCT |
| | | TGAATAGAACTTTACTGGATGGCCGCCTAGTGTTGA |
| | | GTATATATTATCAACCAAAATCCTGTATATAGTCTC |
| | | TGAAAAATTTGACTATCCTAACTTAACAAAAGAGC |
| | | ACCATAATGCAAGCTCATAGTTCTTAGAGACACCA |
| | | ACTATACTTAGCCAAACAAAATGTCCTTGGCCTCTA |
| | | AAGAAGCATTCAGCAAGCTTCCCCAGAAGTTGCAC |
| | | AACTTCTTCATCAAGTTTACCCCCAGACCGTTTGCC |
| | | GAATATTCGGAAAAGCCTTCGACTATAGTGGATCC |
| | | (SEQ ID NO: 76) |
| L-Xylulose | 1.1.1.10 | >gi\|20378203\|gb\|AF375616.1\| |
| reductase | | Hypocrea jecorina L-xylulose |
| | | reductase mRNA, complete cds (85-885) |
| | | GCCTCGTCCGCCATCTCCCGTCTCACCAGTCGCTGT |
| | | CAATCAAGATTCATCACGAAATACTCCCCATCCTTT |
| | | GCATCGCCCATCATGCCTCAGCCTGTCCCCACCGCC |
| | | AACAGACTCCTTGATCTCTTCAGCTTGAAGGGCAA |
| | | GGTCGTCGTCGTCACCGGCGCTTCCGGCCCTCGAGG |
| | | CATGGGAATCGAAGCTGCCCGTGGCTGCGCCGAGA |
| | | TGGGCGCTGACCTCGCCATCACCTACTCGTCTCGCA |
| | | AGGAGGGCGCGGAGAAGAACGCCGAGGAATTGAC |
| | | CAAGGAATACGGCGTCAAAGTCAAGGTGTACAAGG |
| | | TCAACCAGAGCGACTACAACGATGTTGAGCGCTTT |
| | | GTGAACCAGGTCGTGTCTGACTTTGGCAAGATCGA |
| | | TGCCTTTATTGCCAACGCCGGAGCCACAGCTAATA |
| | | GCGGAGTTGTTGACGGCAGCGCCAGCGATTGGGAC |
| | | CATGTCATCCAGGTCGACCTGAGCGGCACCGCATA |
| | | CTGCGCAAAGGCTGTTGGCGCGCACTTCAAGAAGC |
| | | AGGGCCACGGCTCCCTTGTCATCACAGCTTCAATGT |
| | | CCGGCCACGTCGCAAACTATCCCCAGGAACAGACC |
| | | TCATACAACGTCGCCAAGGCCGGTTGCATCCATCTG |
| | | GCGCGGTCTCTGGCCAACGAGTGGCGTGATTTTGCC |
| | | CGCGTCAACAGCATTTCGCCCGGTTATATCGATACC |
| | | GGCCTGTCCGACTTCATCGACGAGAAGACGCAAGA |
| | | GCTGTGGAGGAGCATGATCCCCATGGGACGAAACG |
| | | GCGATGCCAAGGAGCTCAAGGGCGCGTATGTATAT |
| | | CTGGTCAGCGACGCTAGCTCGTACACGACGGGAGC |
| | | CGATATTGTGATTGACGGAGGTTACACTACACGAT |
| | | AAAGAAATAATGTATTGTTAGACTATAATCAATGT |
| | | GACGAACAAGATTTGTGATTAAGAAAAAAAAAAA |
| | | AAAAAAAAAAAAA |
| | | (SEQ ID NO: 77) |
| L-Arabitol | 1.1.1.12 | >gi\|15811374\|gb\|AF355628.1\| |
| 4- | | Hypocrea jecorina L- |
| dehydrogenase | | arabinitol 4-dehydrogenase (LAD1) |
| | | mRNA, complete cds (164-1297) |
| | | CCCAAGAAGGCCTGGAACAGAAGATCAAAAGCAG |
| | | AGAAGAGAGCGTATATAAGCATACATACACTCCCT |
| | | CTGCTCCGGTATTGTGGTTGATCTCCAAACGCGTCA |
| | | TCCCTCCCAACCCTCAAACGCCTTGTTCGCCGGAGA |
| | | CCGCGCGCATTCACAGCTCGCCATGTCGCCTTCCGC |
| | | AGTCGATGACGCTCCCAAGGCCACAGGGGCAGCCA |
| | | TCTCAGTCAAGCCCAACATTGGCGTCTTCACAAATC |
| | | CAAAACATGACCTCTGGATTAGCGAAGCTGAACCC |
| | | AGCGCCGATGCCGTCAAATCTGGCGCTGATCTGAA |
| | | GCCCGGCGAGGTGACCATTGCTGTCCGCAGCACTG |
| | | GTATCTGTGGTTCAGATGTCCATTTCTGGCACGCCG |
| | | GCTGCATTGGGCCCATGATCGTCGAGGGCGACCAC |
| | | ATCCTCGGCCACGAGTCTGCCGGCGAGGTCATCGC |
| | | CGTCCACCCGACTGTCAGTAGCCTCCAAATCGGCG |
| | | ATCGGGTTGCCATCGAGCCCAACATCATCTGCAAC |
| | | GCATGCGAGCCCTGCCTGACAGGTCGATACAACGG |
| | | CTGCGAAAAGGTCGAGTTCCTATCCACGCCGCCAG |
| | | TGCCCGGACTGCTGCGACGCTACGTCAACCACCCA |
| | | GCCGTTTGGTGCCACAAGATTGGCAACATGTCGTG |
| | | GGAGAACGGCGCGCTGCTGGAGCCCCTGAGCGTGG |
| | | CTCTGGCCGGCATGCAGAGGGCCAAGGTTCAGCTC |
| | | GGTGACCCCGTGCTGGTCTGCGGCGCTGGTCCGATT |
| | | GGATTGGTGTCAATGCTGTGCGCTGCTGCCGCCGGT |
| | | GCTTGCCCGCTTGTCATCACAGACATTTCAGAGAGC |
| | | CGTCTGGCGTTTGCAAAGGAGATCTGCCCCCGCGTC |
| | | ACCACGCACCGCATCGAGATTGGCAAGTCGGCTGA |
| | | GGAAACGGCCAAAAGCATCGTCAGCTCTTTTGGGG |
| | | GCGTCGAGCCAGCCGTGACCCTGGAGTGCACCGGT |
| | | GTGGAGAGCAGCATTGCAGCGGCCATCTGGGCCAG |
| | | CAAGTTTGGAGGAAAGGTCTTTGTGATCGGCGTCG |
| | | GCAAGAATGAAATCAGCATTCCCTTTATGAGGGCC |
| | | AGTGTACGCGAGGTCGATATCCAGCTGCAGTATCG |
| | | CTACAGCAACACCTGGCCTCGTGCCATCCGGCTCAT |
| | | CGAGAGCGGTGTCATCGATCTATCCAAATTTGTGAC |
| | | GCATCGCTTCCCGCTGGAGGATGCCGTCAAGGCAT |
| | | TTGAGACGTCAGCAGATCCCAAGAGCGGCGCCATT |
| | | AAGGTCATGATTCAGAGCCTGGATTGAGAGTGAGG |
| | | TGCTACCAGGTAGAGGTAGATAATAGATAGATGAT |
| | | GAAGATGGAAAGACTGCGGGCGCAAGAATCGGGC |
| | | GGATAGGGAGTTGGCTGTAATGGTTTGCAAAGCAT |
| | | AAAAAAAAAAAAAAAAAAAAA |
| | | (SEQ ID NO: 78) |
| Aldose | 1.1.1.21 | >gi\|3260\|emb\|X59465.1\| P.stipitis |
| reductase | | XYL1-gene for NAD(P)H-dependent |
| | | Xylose reductase (356-1312) |
| | | GATCCACAGACACTAATTGGTTCTACATTATTCGTG |
| | | TTCAGACACAAACCCCAGCGTTGGCGGTTTCTGTCT |
| | | GCGTTCCTCCAGCACCTTCTTGCTCAACCCCAGAAG |
| | | GTGCACACTGCAGACACACATACATACGAGAACCT |
| | | GGAACAAATATCGGTGTCGGTGACCGAAATGTGCA |
| | | AACCCAGACACGACTAATAAACCTGGCAGCTCCAA |
| | | TACCGCCGACAACAGGTGAGGTGACCGATGGGGTG |
| | | CCAATTAATGTCTGAAAATTGGGGTATATAAATAT |
| | | GGCGATTCTCCGGAGAATTTTTCAGTTTTCTTTTCAT |
| | | TTCTCCAGTATTCTTTTCTATACAACTATACTACAAT |
| | | GCCTTCTATTAAGTTGAACTCTGGTTACGACATGCC |
| | | AGCCGTCGGTTTCGGCTGTTGGAAAGTCGACGTCG |
| | | ACACCTGTTCTGAACAGATCTACCGTGCTATCAAGA |
| | | CCGGTTACAGATTGTTCGACGGTGCCGAAGATTAC |
| | | GCCAACGAAAAGTTAGTTGGTGCCGGTGTCAAGAA |
| | | GGCCATTGACGAAGGTATCGTCAAGCGTGAAGACT |
| | | TGTTCCTTACCTCCAAGTTGTGGAACAACTACCACC |
| | | ACCCAGACAACGTCGAAAAGGCCTTGAACAGAACC |
| | | CTTTCTGACTTGCAAGTTGACTACGTTGACTTGTTC |
| | | TTGATCCACTTCCCAGTCACCTTCAAGTTCGTTCCA |
| | | TTAGAAGAAAAGTACCCACCAGGATTCTACTGTGG |
| | | TAAGGGTGACAACTTCGACTACGAAGATGTTCCAA |
| | | TTTTAGAGACCTGGAAGGCTCTTGAAAAGTTGGTC |
| | | AAGGCCGGTAAGATCAGATCTATCGGTGTTTCTAA |
| | | CTTCCCAGGTGCTTTGCTCTTGGACTTGTTGAGAGG |
| | | TGCTACCATCAAGCCATCTGTCTTGCAAGTTGAACA |
| | | CCACCCATACTTGCAACAACCAAGATTGATCGAAT |
| | | TCGCTCAATCCCGTGGTATTGCTGTCACCGCTTACT |
| | | CTTCGTTCGGTCCTCAATCTTTCGTTGAATTGAACC |
| | | AAGGTAGAGCTTTGAACACTTCTCCATTGTTCGAGA |
| | | ACGAAACTATCAAGGCTATCGCTGCTAAGCACGGT |
| | | AAGTCTCCAGCTCAAGTCTTGTTGAGATGGTCTTCC |
| | | CAAAGAGGCATTGCCATCATTCCAAAGTCCAACAC |
| | | TGTCCCAAGATTGTTGGAAAACAAGGACGTCAACA |
| | | GCTTCGACTTGGACGAACAAGATTTCGCTGACATTG |
| | | CCAAGTTGGACATCAACTTGAGATTCAACGACCCA |
| | | TGGGACTGGGACAAGATTCCTATCTTCGTCTAAGA |
| | | AGGTTGCTTTATAGAGAGGAAATAAAACCTAATAT |
| | | ACATTGATTGTACATTTAAAATTGAATATTGTAGCT |
| | | AGCAGATTCGGAAATTTAAAATGGGAAGGTGATTC |
| | | TATCCGTACGAATGATCTCTATGTACATACACGTTG |
| | | AAGATAGCAGTACAGTAGACATCAAGTCTACAGAT |
| | | CATTAAACATATCTTAAATTGTAGAAAACTATAAA |
| | | CTTTTCAATTCAAACCATGTCTGCCAAGGAATCAAA |
| | | TGAGATTTTTTTCGCAGCCAAACTTGAATCCAAAAA |
| | | TAAAAAACGTCATTGTCTGAAACAACTCTATCTTAT |
| | | CTTTCACCTCATCAATTCATTGCATATCATAAAAGC |
| | | CTCCGATAGCATACAAAACTACTTCTGCATCATATC |
| | | TAAATCATAGTGCCATATTCAGTAACAATACCGGT |
| | | AAGAAACTTCTATTTTTTTAGTCTGCCTTAACGAGA |
| | | TGCAGATCGATGCAACGTAAGATCAAACCCCTCCA |
| | | GTTGTACAGTCAGTCATATAGTGAACACCGTACAA |
| | | TATGGTATCTACGTTCAAATAGACTCCAATACAGCT |
| | | GGTCTGCCCAAGTTGAGCAACTTTAATTTAGAGAC |
| | | AAAGTCGTCTCTGTTGATGTAGGCACCACACATTCT |
| | | TCTCTTGCCCGTGAACTCTGTTCTGGAGTGGAAACA |
| | | TCTCCAGTTGTCAAATATCAAACACTGACCAGGCTT |
| | | CAACTGGTAGAAGATTTCGTTTTCGG |
| | | (SEQ ID NO: 79) |
| Ribulokinase | 2.7.1.16 | >gi\|145303\|gb\|M15263.1\|ECOARAABD |
| | | E.coli araBAD operon encoding |
| | | L-ribulokinase, L-arabinose |
| | | isomerase, and L-ribulose |
| | | 5-phosphate 4-epimerase (120-1820) |
| | | CGTCACACTTTGCTATGCCATAGCATTTTTATCCAT |
| | | AAGATTAGCGGATCCTACCTGACGCTTTTTATCGCA |
| | | ACTCTCTACTGTTTCTCCATACCCGTTTTTTTGGATG |
| | | GAGTGAAACGATGGCGATTGCAATTGGCCTCGATT |
| | | TTGGCAGTGATTCTGTGCGAGCTTTGGCGGTGGACT |
| | | GCGCCAGCGGTGAAGAGATCGCCACCAGCGTAGAG |
| | | TGGTATCCCCGTTGGCAAAAAGGGCAATTTTGTGAT |
| | | GCCCCGAATAACCAGTTCCGTCATCATCCGCGTGAC |
| | | TACATTGAGTCAATGGAAGCGGCACTGAAAACCGT |
| | | GCTTGCAGAGCTTAGCGTCGAACAGCGCGCAGCTG |
| | | TGGTCGGGATTGGCGTTGACAGTACCGGCTCGACG |
| | | CCCGCACCGATTGATGCCGACGGTAACGTGCTGGC |
| | | GCTGCGCCCGGAGTTTGCCGAAAACCCGAACGCGA |
| | | TGTTCGTATTGTGGAAAGACCACACTGCGGTTGAA |
| | | AGAAGCGAAGAGATTACCCGTTTGTGCCACGCGCC |
| | | GGGCAATGTTGACTACTCCCGCTATATTGGCGGTAT |
| | | TTATTCCAGCGAATGGTTCTGGGCAAAAATCCTGCA |
| | | TGTGACTCGCCAGGACAGCGCCGTGGCGCAATCTG |
| | | CCGCATCGTGGATTGAGCTGTGCGACTGGGTGCCA |
| | | GCTCTGCTTTCCGGTACCACCCGCCCGCAGGATATT |
| | | CGTCGCGGACGTTGCAGCGCCGGGCATAAATCTCT |
| | | GTGGCACGAAAGCTGGGGCGGCTTGCCGCCAGCCA |
| | | GTTTCTTTGATGAGCTGGACCCGATCCTCAATCGCC |
| | | ATTTGCCTTCCCCGCTGTTCACTGACACCTGGACTG |
| | | CCGATATTCCGGTGGGCACCTTATGCCCGGAATGG |
| | | GCGCAGCGTCTCGGCCTGCCTGAAAGCGTGGTGAT |
| | | TTCCGGCGGCGCGTTTGACTGCCATATGGGCGCAGT |
| | | TGGCGCAGGCGCACAGCCTAACGCACTGGTAAAAG |
| | | TTATCGGTACTTCCACCTGCGACATTCTGATTGCCG |
| | | ACAAACAGAGCGTTGGCGAGCGGGCAGTTAAAGGT |
| | | ATTTGCGGTCAGGTTGATGGCAGCGTGGTGCCTGG |
| | | ATTTATCGGTCTGGAAGCAGGCCAATCGGCGTTTG |
| | | GTGATATCTACGCCTGGTTCGGTCGCGTACTCAGCT |
| | | GGCCGCTGGAACAGCTTGCCGCCCAGCATCCGGAA |
| | | CTGAAAGCGCAAATCAACGCCAGCCAGAAACAACT |
| | | GCTTCCGGCGCTGACCGAAGCATGGGCCAAAAATC |
| | | CGTCTCTGGATCACCTGCCGGTGGTGCTCGACTGGT |
| | | TTAACGGTCGTCGCTCGCCAAACGCTAACCAACGC |
| | | CTGAAAGGGGTGATTACCGATCTTAACCTCGCTACC |
| | | GACGCTCCGCTGCTGTTCGGCGGTTTGATTGCTGCC |
| | | ACCGCCTTTGGCGCACGCGCAATCATGGAGTGCTTT |
| | | ACCGATCAGGGGATCGCCGTCAATAACGTGATGGC |
| | | GCTGGGCGGCATCGCGCGGAAAAACCAAGTCATTA |
| | | TGCAGGCCTGCTGCGACGTGCTGAATCGCCCGCTG |
| | | CAAATTGTTGCCTCTGACCAGTGCTGTGCGCTCGGT |
| | | GCGGCGATTTTTGCTGCCGTCGCCGCGAAAGTGCA |
| | | CGCAGACATCCCATCAGCCCAGCAAAAAATGGCCA |
| | | GTGCGGTAGAGAAAACCCTGCAACCGCGCAGCGAA |
| | | CAGGCACAACGCTTTGAACAGCTTTATCGCCGCTAT |
| | | CAGCAATGGGCGATGAGCGCCGAACAACACTATCT |
| | | TCCAACTTCCGCCCCGGCACAGGCTGCCCAGGCCG |
| | | TTGCGACTCTATAAGGACACGATAATGACGATTTTT |
| | | GATAATTATGAAGTGTGGTTTGTCATTGGCAGCCAG |
| | | CATCTGTATGGCCCGGAAACCCTGCGTCAGGTCAC |
| | | CCAACATGCCGAGCACGTTGTTAATGCGCTGAATA |
| | | CGGAAGCGAAACTGCCCTGCAAACTGGTGTTGAAA |
| | | CCGCTGGGCACCACGCCGGATGAAATCACCGCTAT |
| | | TTGCCGCGACGCGAATTACGACGATCCGTGCGCTG |
| | | GTCTGGTGGTGTGGCTGCACACCTTCTCCCCGGCCA |
| | | AAATGTGGATCAACGGCCTGACCATGCTCAACAAA |
| | | CCGTTGCTGCAATTCCACACCCAGTTCAACGCGGCG |
| | | CTGCCGTGGGACAGTATCGATATGGACTTTATGAA |
| | | CCTGAACCAGACTGCACATGGCGGTCGCGAGTTCG |
| | | GCTTCATTGGCGCGCGTATGCGTCAGCAACATGCC |
| | | GTCGTTACCGGTCACTGGCAGGATAAACAAGCCCA |
| | | TGAGCGTATCGGCTCCTGGATGCGTCAGGCGGTTTC |
| | | TAAACAGGATACCCGTCATCTGAAAGTCTGCCGTTT |
| | | TGGCGATAACATGCGTGAAGTGGCGGTCACCGATG |
| | | GTGATAAAGTTGCCGCACAGATCAAGTTCGGTTTCT |
| | | CCGTCAATACCTGGGCGGTTGGCGATCTGGTGCAG |
| | | GTGGTGAACTCCATCAGCGACGGCGATGTTAACGC |
| | | GCTGGTCGATGAGTACGAAAGCTGCTACACCATGA |
| | | CGCCTGCAACACAAATCCACGGCGAAAAACGACAG |
| | | AACGTGCTGGAAGCGGCGCGTATTGAGCTGGGGAT |
| | | GAAGCGTTTCCTGGAACAAGGTGGCTTCCACGCGT |
| | | TCACCACCACCTTTGAAGATTTGCACGGTCTGAAAC |
| | | AGCTTCCAGGTCTGGCCGTACAGCGTCTGATGCAG |
| | | CAGGGTTACGGCTTTGCGGGCGAAGGCGACTGGAA |
| | | AACCGCCGCCCTGCTTCGCATCATGAAGGTGATGTC |
| | | AACCGGTCTGCAGGGCGGCACCTCCTTTATGGAGG |
| | | ACTACACCTATCACTTCGAGAAAGGTAATGACTTG |
| | | GTGCTCGGCTCCCATATGCTGGAAGTCTGCCCGTCG |
| | | ATTGCCGTAGAAGAGAAACCGATCCTCGACGTTCA |
| | | GCATCTCGGTATTGGTGGTAAGGACGATCCTGCCC |
| | | GACTGATCTTCAATACCCAAACCGGTCCAGCGATT |
| | | GTCGCCAGCCTGATTGATCTCGGCGATCGTTACCGT |
| | | CTGCTGGTTAACTGTATCGACACGGTGAAAACACC |
| | | GCACTCCCTGCCGAAACTGCCGGTGGCGAATGCGC |
| | | TGTGGAAAGCGCAACCGGATCTGCCAACTGCTTCC |
| | | GAAGCGTGGATCCTCGCTGGTGGCGCGCACCATAC |
| | | CGTCTTCAGCCATGCGCTGAACCTCAACGATATGCG |
| | | CCAGTTCGCCGAGATGCACGACATTGAAATCACGG |
| | | TGATTGATAACGATACCCGCCTGCCAGCGTTTAAA |
| | | GACGCGCTGCGCTGGAACGAAGTGTATTACGGATT |
| | | TCGTCGCTAAGTAGTCGCATCAGGTGTGTAACGCCT |
| | | GATGCGGCCTGACGCGTCTTATCAGGCCTACACGCT |
| | | GCGATTTTGTAGGCCGGATAAGCAAAGCGCATCCG |
| | | GCATTCAACGCCTGATGCGACGCTGGCGCGTCTTAT |
| | | CAGGCCTACGCGTTCCGATTTTGTAGGCCGGATAA |
| | | GCAAAGCGCATCCGGCATTCAACGCCTGATGCGAC |
| | | GCTGGCGCGTCTTATCAGGCCTACACGCTGCGATTT |
| | | TGTAGGCCGGATAAGCAAAGCGCATCCGGCACGAA |
| | | GGAGTCAACATGTTAGAAGATCTCAAACGCCAGGT |
| | | ATTAGAGGCCAACCTGGCGCTGCCAAAACATAACC |
| | | TGGTCACGCTCACATGGGGCAACGTCAGCGCCGTT |
| | | GATCGCGAGCGCGGCGTCTTTGTGATCAAACCTTCC |
| | | GGCGTCGATTACAGCATCATGACCGCTGACGATAT |
| | | GGTCGTGGTTAGCATCGAAACCGGTGAAGTGGTTG |
| | | AAGGTGCGAAAAAGCCCTCCTCCGATACGCCAACT |
| | | CACCGACTGCTCTATCAGGCATTCCCGTCCATTGGC |
| | | GGCATTGTGCACACACACTCGCGCCACGCCACTAT |
| | | CTGGGCGCAGGCGGGCCAGTCGATTCCAGCAACCG |
| | | GCACCACCCACGCCGACTATTTCTACGGCACCATTC |
| | | CCTGCACCCGCAAAATGACCGACGCAGAAATCAAC |
| | | GGTGAATATGAGTGGGAAACCGGTAACGTCATCGT |
| | | AGAAACCTTCGAAAAACAGGGTATCGATGCAGCGC |
| | | AAATGCCCGGCGTCCTGGTCCATTCTCACGGCCCAT |
| | | TTGCATGGGGCAAAAATGCCGAAGATGCGGTGCAT |
| | | AACGCCATCGTGCTGGAAGAGGTCGCTTATATGGG |
| | | GATATTCTGCCGTCAGTTAGCGCCGCAGTTACCGGA |
| | | TATGCAGCAAACGCTGCTGAATAAACACTATCTGC |
| | | GTAAGCATGGCGCGAAGGCATATTACGGGCAGTAA |
| | | TGACTGTATAAAACCACAGCCAATCAAACGAAACC |
| | | AGGCTATAATCAAGCCTGGTTTTTTGATGGAATTAC |
| | | AGCGTGGCGCAGGCAGGTTTTATCTTAACCCGACA |
| | | CTGGCGGGACACCCCGCAAGGGACAGAAGTCTCCT |
| | | TCTGGCTGGCGACGGACAACGGGCC |
| | | (SEQ ID NO: 80) |
| Xylulokinase | 2.7.1.17 | >gi\|755795\|emb\|X82408.1\| |
| | | S.cerevisiae XKS1, G7579, G7576 |
| | | and G7572 genes (complement |
| | | 7022-8530) |
| | | GAATTCATAATGTGATAGAATAATGGGTGAAGTGT |
| | | ATAAAGAAGAATATATAATATTACTGTGTAGAAAT |
| | | ATCAATTTCCCTTTGTGAGTTCTCATAACCTCGAGG |
| | | AGAAGTTTTTTTACCCCTCTCCACAGATCGATACTT |
| | | ATCATTAAGAAAATGGGACACCAAGGTTACGGAAA |
| | | AATCTACCCGGTCTACCTAATTACTCTCTTGGCGCA |
| | | CTAGTTTTCCGAAAAAAACAGGTAAATTCTTCTTTA |
| | | GATAAAGATAAATATAAAACTTCACAGCCATTCAC |
| | | TCACACAAACTAGTCCCTTAGGGTGCGTATAATGAT |
| | | CTGTACATCTTATTTCTATATATCTTACCGTGTATTT |
| | | TTTCTTTTCTCAATTCTTGTTCGCAAATAAAAAGAT |
| | | ATTCGTGTTTGTGGAAGAACACTAGTTCCGTTTTGT |
| | | ATTCAACCTGGAAATTTACAATAGATCTTCATCATC |
| | | GTATGTCTACCATGTTAATCTCCCGTTAAACTGTTT |
| | | CACGTTATCAAGATTATGTCATCTATTCCTGGGCGA |
| | | ACATAATTCCTTACAAAAACATTTGTCATTACACAA |
| | | GTGTAAGGGGTAATGAAAAGTAATTTTGTTACAAG |
| | | TACGCAAAATTCGTTTATTTCAAGAAACACTAAGG |
| | | ATCGTCATTTCCCTTTCTGACCGATGTTCCTTCTTTT |
| | | TGCTATTTTTTTCCCGAGTCATCTCATCGTTTTGAGT |
| | | TTTTCCTAGTCCATTAAATTGTCACCTTACTCTCGG |
| | | AAAAAAGAAACGACAAATGCTCCTAGTGCCGTTTT |
| | | TCGAAGCTTGAAAAAAAAAATTGCAAATTATTTAA |
| | | TTTTGCTGCTAAGGAGTTGAAGTAGGTGCATTCCGC |
| | | CTTATTGATCACCCTGTTAGATTTGTTGCGATCGTT |
| | | ATAGTGCTAGTTTGTCCATTGTTGTGTCATAAAAGA |
| | | TAGCTTTGGGAGAAAATTCATCAAAACAACATATC |
| | | ATCAGCGTTATTACAATTCATTGTCCTTCCCAAGTT |
| | | TTTTTGACGTATAATATTATCGCTATCTGACTCATT |
| | | AGTACACAAATACAGATATACAACCTCAAAATCAA |
| | | AAATGCCTAGAAACCCATTGAAAAAGGAATATTGG |
| | | GCAGATGTAGTTGACGGATTCAAGCCGGCTACTTCT |
| | | CCAGCCTTCGAGAATGAAAAAGAATCTACTACATT |
| | | TGTTACCGAACTAACTTCCAAAACCGATTCTGCATT |
| | | TCCATTAAGTAGCAAGGATTCACCTGGCATAAACC |
| | | AAACCACAAACGATATTACCTCTTCAGATCGCTTCC |
| | | GTCGTAATGAAGACACAGAGCAGGAAGACATCAAC |
| | | AACACCAACCTGAGTAAAGATCTATCCGTGAGACA |
| | | TCTTTTAACTCTAGCTGTCGGGGGTGCAATAGGTAC |
| | | TGGTTTATATGTGAATACGGGTGCTGCTTTATCTAC |
| | | AGGTGGTCCGGCCAGTTTAGTTATTGATTGGGTTAT |
| | | TATCAGTACATGTCTTTTTACTGTGATTAACTCTCTT |
| | | GGTGAGCTGTCCGCTGCTTTTCCCGTTGTTGGTGGG |
| | | TTCAATGTTTACAGTATGCGTTTTATTGAGCCTTCA |
| | | TTTGCATTCGCAGTGAACTTAAACTATTTAGCACAA |
| | | TGGCTAGTTCTTCTACCCTTGGAATTAGTGGCCGCA |
| | | TCTATTACTATAAAATACTGGAATGATAAAATTAAT |
| | | TCCGACGCCTGGGTTGCTATCTTTTATGCCACCATT |
| | | GCACTGGCTAATATGTTGGATGTTAAGTCATTTGGT |
| | | GAGACCGAATTTGTATTGTCCATGATTAAAATCCTC |
| | | TCCATCATTGGCTTTACTATCTTAGGTATTGTTTTGT |
| | | CCTGTGGTGGTGGGCCTCACGGCGGTTACATTGGTG |
| | | GTAAATACTGGCATGACCCAGGCGCTTTTGTAGGG |
| | | CACAGCTCGGGAACTCAGTTTAAAGGTTTATGTTCA |
| | | GTTTTTGTTACCGCTGCCTTTTCTTATTCCGGTATTG |
| | | AAATGACTGCTGTCTCCGCTGCTGAAAGTAAAAAT |
| | | CCAAGAGAAACCATTCCCAAGGCAGCAAAGAGAA |
| | | CTTTTTGGCTGATTACCGCCTCTTATGTGACTATATT |
| | | GACTTTGATTGGTTGCTTGGTTCCATCCAATGACCC |
| | | TAGGTTACTAAACGGTTCAAGTTCAGTGGACGCTG |
| | | CCTCATCTCCTCTGGTTATCGCAATTGAAAACGGGG |
| | | GTATTAAAGGTCTACCATCATTAATGAACGCCATTA |
| | | TTTTGATTGCTGTTGTTTCCGTGGCTAACAGTGCTG |
| | | TTTATGCATGTTCAAGGTGTATGGTCGCCATGGCTC |
| | | ATATTGGTAATTTACCAAAATTTTTGAACCGTGTTG |
| | | ACAAAAGGGGTAGACCAATGAATGCTATCTTGTTA |
| | | ACTTTGTTTTTTGGTTTGCTTTCCTTTGTGGCAGCAA |
| | | GTGATAAGCAAGCTGAAGTCTTTACATGGTTGAGT |
| | | GCCTTATCTGGTTTATCGACAATTTTCTGCTGGATG |
| | | GCCATTAATCTTTCCCATATTAGATTTCGCCAAGCC |
| | | ATGAAAGTTCAAGAAAGGTCTTTAGACGAATTACC |
| | | CTTCATTTCTCAAACTGGCGTCAAGGGATCCTGGTA |
| | | TGGTTTTATCGTTTTATTTCTGGTTCTTATAGCATCG |
| | | TTTTGGACTTCTCTGTTCCCATTAGGCGGTTCAGGA |
| | | GCCAGCGCAGAATCATTCTTTGAAGGATACTTATCC |
| | | TTTCCAATTTTGATTGTCTGTTACGTTGGACATAAA |
| | | CTGTATACTAGAAATTGGACTTTGATGGTGAAACTA |
| | | GAAGATATGGATCTTGATACCGGCAGAAAACAAGT |
| | | AGATTTGACTCTTCGTAGGGAAGAAATGAGGATTG |
| | | AGCGAGAAACATTAGCAAAAAGATCCTTCGTAACA |
| | | AGATTTTTACATTTCTGGTGTTGAAGGGAAAGATAT |
| | | GAGCTATACAGCGGAATTTCCATATCACTCAGATTT |
| | | TGTTATCTAATTTTTTCCTTCCCACGTCCGCGGGAA |
| | | TCTGTGTATATTACTGCATCTAGATATATGTTATCTT |
| | | ATCTTGGCGCGTACATTTAATTTTCAACGTATTCTA |
| | | TAAGAAATTGCGGGAGTTTTTTTCATGTAGATGATA |
| | | CTGACTGCACGCAAATATAGGCATGATTTATAGGC |
| | | ATGATTTGATGGCTGTACCGATAGGAACGCTAAGA |
| | | GTAACTTCAGAATCGTTATCCTGGCGGAAAAAATT |
| | | CATTTGTAAACTTTAAAAAAAAAAGCCAATATCCC |
| | | CAAAATTATTAAGAGCGCCTCCATTATTAACTAAA |
| | | ATTTCACTCAGCATCCACAATGTATCAGGTATCTAC |
| | | TACAGATATTACATGTGGCGAAAAAGACAAGAACA |
| | | ATGCAATAGCGCATCAAGAAAAAACACAAAGCTTT |
| | | CAATCAATGAATCGAAAATGTCATTAAAATAGTAT |
| | | ATAAATTGAAACTAAGTCATAAAGCTATAAAAAGA |
| | | AAATTTATTTAAATGCAAGATTTAAAGTAAATTCAC |
| | | TTAAGCCTTGGCAACGTGTTCAACCAAGTCGACAA |
| | | CTCTGGTAGAGTAACCGTATTCGTTGTCGTACCAGG |
| | | AGACCAACTTGACGAACTTTGGAGACAATTGGATA |
| | | CCAGCGGAAGCATCGAAGATGGAAGAGTGAGAGT |
| | | CACCCAAGAAGTCAGAGGAGACAACAGCGTCTTCG |
| | | GTGTAACCCAAAACACCCTTCAACTTACCTTCAGCG |
| | | GCAGCCTTAACAACCTTCTTGATTTCATCGTAGGTG |
| | | GTTTCCTTGTTCAACTTGACAGTCAAGTCAACAACG |
| | | GAGACATCGACGGTTGGGACTCTGAAAGCCATACC |
| | | GGTCAACTTACCTTGCAATTCTGGCAAGACCTTACC |
| | | GACAGCCTTAGCAGCACCGGTGGAGGATGGGATGA |
| | | TGTTACCGGAAGCGGTTCTACCACCTCTCCAGTCCT |
| | | TGTGGGATGGACCGTCAACAGTCTTTTGAGTAGCA |
| | | GTCAAAGAGTGGACAGTGGTCATCAAACCTTCTTC |
| | | AATACCGAAAGCATCGTTGATAACCTTGGCCAATG |
| | | GAGCCAAACAGTTGGTGGTACAAGAAGCGTTGGAA |
| | | ACAATCTTCAAGTCAGAAGTGTATTTTTCTTCGTTA |
| | | ACACCCATGACGAACATTGGGGCGGTGGAAGATGG |
| | | AGCAGTGATAACAACCTTCTTGGCACCAGCGTCAA |
| | | TGTGCTTTTGAGCAGTGTCTAATTCCTTGAAAACAC |
| | | CAGTGGAGTCAATGGCGATGTCAACGTTGGAAGAA |
| | | CCCCATGGCAAGTTAGCTGGGTCTCTTTCTTGGTAA |
| | | GTAGCAATCTTCTTACCATCGACAATGATGTGCTTG |
| | | TCATCGTGGGAAACTTCACCAGCGTATCTACCGTGA |
| | | GTGGAGTCGTACTTGAACATGTAAGCAGCGTAGTC |
| | | GTTGGTGATGAATGGGTCGTTCAAAGCAACAACTT |
| | | CGACGTTTGGTCTAGACAAAGCAATTCTCATGACC |
| | | AATCTACCGATTCTACCGAAACCGTTAATAGCAACT |
| | | CTAACCATTTTGTTTGTTTATGTGTGTTTATTCGAAA |
| | | CTAAGTTCTTGGTGTTTTAAAACTAAAAAAAAGACT |
| | | AACTATAAAAGTAGAATTTAAGAAGTTTAAGAAAT |
| | | AGATTTACAGAATTACAATCAATACCTACCGTCTTT |
| | | ATATACTTATTAGTCAAGTAGGGGAATAATTTCAG |
| | | GGAACTGGTTTCAACCTTTTTTTTCAGCTTTTTCCAA |
| | | ATCAGAGAGAGCAGAAGGTAATAGAAGGTGTAAG |
| | | AAAATGAGATAGATACATGCGTGGGTCAATTGCCT |
| | | TGTGTCATCATTTACTCCAGGCAGGTTGCATCACTC |
| | | CATTGAGGTTGTGCCCGTTTTTTGCCTGTTTGTGCCC |
| | | CTGTTCTCTGTAGTTGCGCTAAGAGAATGGACCTAT |
| | | GAACTGATGGTTGGTGAAGAAAACAATATTTTGGT |
| | | GCTGGGATTCTTTTTTTTTCTGGATGCCAGCTTAAA |
| | | AAGCGGGCTCCATTATATTTAGTGGATGCCAGGAA |
| | | TAAACTGTTCACCCAGACACCTACGATGTTATATAT |
| | | TCTGTGTAACCCGCCCCCTATTTTGGGCATGTACGG |
| | | GTTACAGCAGAATTAAAAGGCTAATTTTTTGACTAA |
| | | ATAAAGTTAGGAAAATCACTACTATTAATTATTTAC |
| | | GTATTCTTTGAAATGGCAGTATTGATAATGATAAAC |
| | | TCGAACTGAAAAAGCGTGTTTTTTATTCAAAATGAT |
| | | TCTAACTCCCTTACGTAATCAAGGAATCTTTTTGCC |
| | | TTGGCCTCCGCGTCATTAAACTTCTTGTTGTTGACG |
| | | CTAACATTCAACGCTAGTATATATTCGTTTTTTTCA |
| | | GGTAAGTTCTTTTCAACGGGTCTTACTGATGAGGCA |
| | | GTCGCGTCTGAACCTGTTAAGAGGTCAAATATGTCT |
| | | TCTTGACCGTACGTGTCTTGCATGTTATTAGCTTTG |
| | | GGAATTTGCATCAAGTCATAGGAAAATTTAAATCTT |
| | | GGCTCTCTTGGGCTCAAGGTGACAAGGTCCTCGAA |
| | | AATAGGGTCAAAGTATTTCGAATTTGTGTCCATTAG |
| | | TGGTGTTCCGTGTGAGAACTGGTAAGCTTCTTTCAT |
| | | GAAAGAGTTCAATGATTCACTCAGTTTGTCAAACG |
| | | GAATAGAGGCGGGAGCATGGAACACTAATTGCTCT |
| | | TCAAATTCTACAGGAGTAATCTTTGGCTTGTCGGCA |
| | | GCTTTTGTTTGAGCTTGCTCGGCTATTTTTGGTTTGA |
| | | GCTGTATAGGTTTAATGTTCGATAAATCGAGACGTT |
| | | CGTTCTTCTTGATAAATTCTGTTACCTTGTTAACCG |
| | | AATCTTGTGGTATTTTCCCTAGGTATGCTAGCACAT |
| | | CACCCTTTAATAGTCTACCGTTGGAACCAGATGGCG |
| | | CAATTTCCTTCAAAGCCTTTTGTTTGGATATATTGTT |
| | | CTCAGCCAGTAGTAATGACACGGATGGTAATAGCG |
| | | TCTGTTCAAGATTGGCTTGGCTGCCGTCAACGGTTT |
| | | TTATTGGTGTAACTGTGGCTTTTTTTAAATGTTGTTG |
| | | TGTTGCTTCAGTACTATCTGCGGATGGCTTCTTAAT |
| | | TTCAATAGATTTCGCATTTGCGGTGTTGGCCTCTTG |
| | | GGGTAACTTTATAGTAGCTAAATCATCATCAACATC |
| | | AGCAATATAAGCAATAGGTTCACCAACATCAACAT |
| | | CTTTAGAGCCTTCATCTTTCAGGATCTTAGCTAGTT |
| | | TACCATCGTCCAGTGCTTCCACATCAATTTGAGATT |
| | | TATCTGTTTCCACTTCTAATATCACATCGCCCGCGC |
| | | TGAATGGTTCGCCAACTTTATATTTCCAAGACACAA |
| | | TCCCCCCTTTCTCCATAGTAGGAGACATTGCAGGCA |
| | | TTGAAAATGTCTTTACAGCAAGTAATTTAGCTGATG |
| | | CATGATAGTTGCATTTGGTTAAATATCTTGTACATG |
| | | ATTTTAAAGTGGAGACTTTGGAAATTGCACTTAGCA |
| | | TTTTTGAATTTTTCCCTCGAGATGATTTAACAATAA |
| | | CCTAGCTCTTTCAATGCTCTCTTATATTCTCACTGGA |
| | | AAGCGCTAATTTGATTTGTCTCTCTCGTTGCTGGTC |
| | | GCTCACCCTTTCATAAATTGTTTTTTACTCTTCATTT |
| | | ATTGATTTTACTTTTTGTCATTTTCCGAACGGGGAA |
| | | CAAAATGATGACTACTTGCTACAGTATACGAAACA |
| | | TACAAGGGCATTGTCATGTGCACGCATAATAACGG |
| | | TGATATATATATATGTATGTATATTATGTGTCTGTG |
| | | TTTGTGTGTACTTGTCAGGGCATGATAAATTATTCA |
| | | AACATATTTTAGATGAGAGTCTTTTCCAGTTCGCTT |
| | | AAGGGGACAATCTTGGAATTATAGCGATCCCAATT |
| | | TTCATTATCCACATCGGATATGCTTTCCATTACATG |
| | | CCATGGAAAATTGTCATTCAGAAATTTATCAAAAG |
| | | GAACTGCAATTTTATTAGAGTCATATAACAATGACC |
| | | ACATGGCCTTATAACAACCACCAAGGGCACATGAG |
| | | TTTGGTGTTTCTAGCCTAAAATTACCCTTTGTAGCA |
| | | CCAATGACTTGAGCAAACTTCTTCACAATAGCATCG |
| | | TTTTTAGAAGCCCCACCTACAAAAAAAGTCCTTTCT |
| | | GCCTTTTATTTAGGTAGTCCCGCAGCGGAGATTCAT |
| | | CGTAATCAAACTTCACGATTGTATCTTCGTTCAGTC |
| | | TCTGTTGTGAGCTTGCGTTTGAATCCGAAAGCAGGG |
| | | GAGATATTCTTACCCTGCAACTTAAAGCCTGTGATT |
| | | CTACAATATTTTTGGCATCGTGCCTCTTGTCTTTGA |
| | | ACTTGGCCACCTCTCTTTCAATCATACCCGTTTTTG |
| | | GATTGAAGATAACCCTTTTGTTTATGGCTTTTACGC |
| | | TAGGAACGATCTCCCCCAGAGGAAAATATACACCT |
| | | AATTCATTTTCACTACTTTCTGAGTCATCTAGCACA |
| | | GCTTGATTAAAAAGAGTCCAATCGTTAGTCTTCTCA |
| | | TAATTATTTTCCCGTTCTTTGTTTAACTCGTCTCTTA |
| | | TCCTCTCCCTTGCCAAAGAACCATTACAATAACAAA |
| | | TCATACCCATATAATGGTTTGGCAGAGTTGGATGA |
| | | ATGAAAAGATGATAGTTCGGAGAGGGGTGATACTT |
| | | ATCGGTGACCAGAAGAACTGTAGTACTTGTTCCTA |
| | | GGGAAACGAGAACGTCATTCTTCCGCAGGGGTAAA |
| | | GAACATATAGTGGCTAAATTATCCCCAGTCATGGG |
| | | AGAGACCTTGCAGTTTGTATTGAAACCGTACTTCTC |
| | | AATAAAATATTTACAGATGGTACCCGCTATCAAATT |
| | | TTTCATGGGTGCTCTCATTAATTTTTGTCTGATAGTT |
| | | TTATCCTTAGAAGAACTATCAATTAGATGTAGTAGC |
| | | TCATCACTGAATTTTCTTTCACGTATATCATAAAGG |
| | | TTCATACCACAGGCATCTGCCTCCTCTAATTCAACA |
| | | AGATGGCCCACTAAGATAGAAGTCAAAAAATTAGA |
| | | CACTAAAGAAATGGTCTTTGTTTTTTCGTAAGCTTC |
| | | TGGTTCTAATTGTGCAATTTTCAGAATTTGAGGACC |
| | | AGTAAATCTAAAATGGGCTCTGGACCCTGTTAATTG |
| | | AGCCATTTTTTCAGGCCCACCTATGCACTCTTCAAA |
| | | CTCTTGACATTGCTTTGCAGTACTGTGGTCTTGCCA |
| | | ATTGGGGGCGGTTTGCCTTGCAAATGCTACAGAGC |
| | | TCACGTAGTGCAATAAATCTTTTTCCGGTTTCTTATT |
| | | CAATTGCTCTAACAGAGATTCGGCTTGGGAGGACC |
| | | AGTAGACAGACCCGTGCTGCTGGCAGGACCCTGAG |
| | | ACGGCCATAACTTTGTTCAATGGAAATTTAGCCTCG |
| | | CGATATTTCGAGAGAACCAGATCTAGAGCCTCTAA |
| | | CCACATGGCTACGGGACATTCGATAGTGTCGCCGT |
| | | GTATATAGACACCCTTCTTTGTGTGATAATGCGGAA |
| | | GATCCTTTTCAAATTCCACTGTTTCTGAATGGACAA |
| | | TTTTTAGGTCCTGGTTAATGGCGAGACATTTCAGTT |
| | | GTTGGGTCGAAAGATCAAACCCAAGATAGTATGAG |
| | | TCTAAAGACATTGTGTTGGAAACCTCTCTTGTCTGT |
| | | CTCTGAATTACTGAACACAACATTAAAGTACTAATC |
| | | TCATCCTCCTTTTGTTTTTCTCGAGAGGGCCCCCTTA |
| | | TTCGTCCGCCTGAGATTGCATTGGCCGAATTGAAAA |
| | | GTGACAGTTATGCACCTCAGCGGCTATTCCCTGCGT |
| | | CGCTTGCTGAAGATTGAGGATTATAGGAAGTAGTA |
| | | AGCTGGAAATGGTAATTTGTAAAAAGAAAATTTCT |
| | | AATACTGTGACAATGTTATTAAATCGGGGTTGTTTT |
| | | TGTTTGGGGCGGCCAGCGGAATAATTTGTTTTCAAG |
| | | GACAGCAGAAGCTCAGAAGAACAAAATCTCCGTGA |
| | | TCTTTTAAACTTTTTTCCATTCTGATGGAATAATGGT |
| | | CTTGATCCCCTAAATATTTCCTTTTTTATTGCAATTA |
| | | TGATAGAAATTAATAGTAGTCTATGCTGGATGATAT |
| | | ATATATCTCTTTTGAGCTTGCTTCAAATTTTTTCCCG |
| | | TTATAATGATGAGTGTTTTGCTTATTAAGGGTCTAG |
| | | GACATTTCTATCAGTTTCTATACCA |
| | | (SEQ ID NO: 81) |
| L-Ribulose-5- | 5.1.3.4 | >gi\|40938\|emb\|X56048.1\| E. coli |
| phosphate 4- | | araD gene for L-ribulose-phosphate |
| epimerase | | 4-epimerase (EC 5.1.3.4)(466-1161) |
| | | GGATCCTCGCTGGTGGCGCGCACCATACCGTCTTCA |
| | | GCCATGCACTGAACCTCAACGATATGCGCCAATTC |
| | | GCCGGAGATGCACGACATTGAAATCACGGTGATTG |
| | | ATAACGACACCCGCCTGCCAGCGTTTAAAGACGCG |
| | | CTGCGCTGGAACGGAAGTGTATTACGGGTTTCGTC |
| | | GCTAAGTAGCCGCATCCGGTATGTAACGCCTGATG |
| | | CGACGCTGACGCGTCTTATCTGGCCTACACGCTGCG |
| | | ATTTTGTAGGCCGGATAAGCAAAGCGCATCCGGCA |
| | | TTCAACGCCTGATGCGACGCTGGCGCGTCTTATCAG |
| | | GCCTACGCGCTGCGATTTTGTAGGCCGGATAAGCA |
| | | AAGCGCATCCGGCATTCAACGCCTGATGCGACGCT |
| | | GGCGCGTCTTATCAGGCCTACACGCTGCGATTTTGT |
| | | AGGCCGGATAAGCAAAGCGCATCCGGCACGAAGG |
| | | AGTCAACATGTTAGAAGATCTCAAACGCCAGGTAT |
| | | TAGAAGCCAACCTGGCGCTGCCAAAACACAACCTG |
| | | GTCACGCTCACATGGGGCAACGTCAGCGCCGTTGA |
| | | TCGCGAGCGCGGCGTCTTTGTGATCAAACCTTCCGG |
| | | CGTCGATTACAGCGTCATGACCGCTGACGATATGG |
| | | TCGTGGTTAGCATCGAAACCGGTGAAGTGGTTGAA |
| | | GGTACGAAAAAGCCCTCCTCCGACACGCCAACTCA |
| | | CCGGCTGCTCTATCAGGCATTCCCCTCCATTGGCGG |
| | | CATTGTGCATACGCACTCGCGCCACGCCACCATCTG |
| | | GGCGCAGGCGGGTCAGTCGATTCCAGCAACCGGCA |
| | | CCACCCACGCCGACTATTTCTACGGCACCATTCCCT |
| | | GCACCCGCAAAATGACCGACGCAGAAATCAACGGC |
| | | GAATATGAGTGGGAAACCGGTAACGTCATCGTAGA |
| | | AACCTTTGAAAAACAGGGTATCGATGCAGCGCAAA |
| | | TGCCCGGCGTTCTGGTCCATTCCCACGGCCCGTTTG |
| | | CATGGGGCAAAAATGCCGAAGATGCGGTGCATAAC |
| | | GCCATCGTGCTGGAAGAGGTCGCTTATATGGGGAT |
| | | ATTCTGCCGTCAGTTAGCGCCGCAGTTACCGGATAT |
| | | GCAGCAAACGCTGCTGGATAAACACTATCTGCGTA |
| | | AGCATGGCGCGAAGGCATATTACGGGCAGTAATGA |
| | | CTGTATAAAACCACAGCCAATCAAACGAAACCAGG |
| | | CTATACTCAAGCCTGGTT |
| | | (SEQ ID NO: 82) |
| L-Arabinose | 5.3.1.4 | >gi\|1924929\|emb\|X89408.1\| |
| isomerase | | B.subtilis DNA for araA, araB |
| (araA) | | and araD genes (228-1718) |
| | | AAGCTTCTCATCAATGATTTGAATTGGAGCTCGGGC |
| | | TGGCCGTCCTATTGAATTAAAAAGCCGGCTCTGCCC |
| | | CCGGCTTTTTTTAAAAGAAAAGATTGACAGTATAAT |
| | | AGTCAATTACTATAATAAAATTGTTCGTACAAATAT |
| | | TTATTTATAGGTTTTATTTTCTAATTAGTACGTATCT |
| | | TTTGTATTTGAAAGCGTTTTATTTTATGAGAAAGGG |
| | | GCAGTTTACATGCTTCAGACAAAGGATTATGAATTC |
| | | TGGTTTGTGACAGGAAGCCAGCACCTATACGGGGA |
| | | AGAGACGCTGGAACTCGTAGATCAGCATGCTAAAA |
| | | GCATTTGTGAGGGGCTCAGCGGGATTTCTTCCAGAT |
| | | ATAAAATCACTCATAAGCCCGTCGTCACTTCACCGG |
| | | AAACCATTAGAGAGCTGTTAAGAGAAGCGGAGTAC |
| | | AGTGAGACATGTGCTGGCATCATTACATGGATGCA |
| | | CACATTTTCCCCTGCAAAAATGTGGATAGAAGGCC |
| | | TTTCCTCTTATCAAAAACCGCTTATGCATTTGCATA |
| | | CCCAATATAATCGCGATATCCCGTGGGGTACGATT |
| | | GACATGGATTTTATGAACAGCAACCAATCCGCGCA |
| | | TGGCGATCGAGAGTACGGTTACATCAACTCGAGAA |
| | | TGGGGCTTAGCCGAAAAGTCATTGCCGGCTATTGG |
| | | GATGATGAAGAAGTGAAAAAAGAAATGTCCCAGTG |
| | | GATGGATACGGCGGCTGCATTAAATGAAAGCAGAC |
| | | ATATTAAGGTTGCCAGATTTGGAGATAACATGCGT |
| | | CATGTCGCGGTAACGGACGGAGACAAGGTGGGAGC |
| | | GCATATTCAATTTGGCTGGCAGGTTGACGGATATG |
| | | GCATCGGGGATCTCGTTGAAGTGATGGATCGCATT |
| | | ACGGACGACGAGGTTGACACGCTTTATGCCGAGTA |
| | | TGACAGACTATATGTGATCAGTGAGGAAACAAAAC |
| | | GTGACGAAGCAAAGGTAGCGTCCATTAAAGAACAG |
| | | GCGAAAATTGAACTTGGATTAACCGCTTTTCTTGAG |
| | | CAAGGCGGATACACAGCGTTTACGACATCGTTTGA |
| | | AGTGCTGCACGGAATGAAACAGCTGCCGGGACTTG |
| | | CCGTTCAGCGCCTGATGGAGAAAGGCTATGGGTTT |
| | | GCCGGTGAAGGAGATTGGAAGACAGCGGCCCTTGT |
| | | ACGGATGATGAAAATCATGGCTAAAGGAAAAAGA |
| | | ACTTCCTTCATGGAAGATTACACGTACCATTTTGAA |
| | | CCGGGAAATGAAATGATTCTGGGCTCTCACATGCTT |
| | | GAAGTGTGTCCGACTGTCGCTTTGGATCAGCCGAA |
| | | AATCGAGGTTCATTCGCTTTCGATTGGCGGCAAAG |
| | | AGGACCCTGCGCGTTTGGTATTTAACGGCATCAGC |
| | | GGTTCTGCCATTCAAGCTAGCATTGTTGATATTGGC |
| | | GGGCGTTTCCGCCTTGTGCTGAATGAAGTCAACGG |
| | | CCAGGAAATTGAAAAAGACATGCCGAATTTACCGG |
| | | TTGCCCGTGTTCTCTGGAAGCCGGAGCCGTCATTGA |
| | | AAACAGCAGCGGAGGCATGGATTTTAGCCGGCGGT |
| | | GCACACCATACCTGCCTGTCTTATGAACTGACAGCG |
| | | GAGCAAATGCTTGATTGGGCGGAAATGGCGGGAAT |
| | | CGAAAGTGTTCTCATTTCCCGTGATACGACAATTCA |
| | | TAAACTGAAACACGAGTTAAAATGGAACGAGGCGC |
| | | TTTACCGGCTTCAAAAGTAGAGGGGGATGTCACAT |
| | | GGCTTACACAATAGGGGTTGATTTTGGAACTTTATC |
| | | AGGAAGAGCAGTGCTCGTTCATGTCCAAACAGGGG |
| | | AGGAACTTGCGGCTGCTGTAAAAGAATACAGGCAT |
| | | GCTGTCATTGATACCGTCCTTCCAAAAACGGGTCAA |
| | | AAGCTGCCGCGTGACTGGGCGCTGCAGCATTTTGCT |
| | | GATTACCTCGAAGTCTTGGAAACAACCATTCCGTCT |
| | | TTACTCGAACAGACGGGCGTTGACCCGAAAGACAT |
| | | TATCGGGATTGGAATTGATTTCACGGCATGTACGAT |
| | | CCTTCCTATTGACAGCAGCGGGCAGCCGTTATGCAT |
| | | GCTGCCTGAATATGAAGAGGAGCCGCACAGCTATG |
| | | TGAAGCTCTGGAAGCATCATGCGGCCCAAAAACAT |
| | | GCTGATCGGCTCAATCAAATCGCGGAAGAAGAAGG |
| | | AGAGGCTTTTTTACAGCGGTACGGAGGAAAAATTT |
| | | CATCAGAATGGATGATTCCAAAGGTCATGCAAATT |
| | | GCCGAGGAAGCGCCTCACATTTATGAAGCGGCTGA |
| | | CCGGATCATCGAGGCTGCGGACTGGATCGTGTACC |
| | | AGCTGTGCGGCTCGCTCAAGCGAAGCAATTGCACC |
| | | GCAGGGTATAAAGCGATGTGGAGTGAAAAAGCGG |
| | | GGTATCCGTCAGATGATTTCTTTGAGAAATTAAATC |
| | | CTTCAATGAAAACGATTACAAAGGACAAATTGTCA |
| | | GGTTCTATTCATTCAGTAGGAGAAAAAGCCGGCAG |
| | | TCTGACTGAAAAAATGGCAAAGCTGACAGGGCTTC |
| | | TCCCGGGAACGGCTGTTGCGGTTGCCAATGTGGAC |
| | | GCTCATGTTTCGGTACCGGCGGTCGGCATTACAGA |
| | | GCCAGGGAAAATGCTGATGATTATGGGAACCTCGA |
| | | CGTGCCATGTTCTACTTGGTGAAGAGGTGCATATCG |
| | | TTCCAGGAATGTGCGGCGTTGTGGACAACGGAATT |
| | | CTCCCGGGCTATGCGGGATATGAAGCCGGGCAGTC |
| | | CTGTGTCGGCGATCATTTTGACTGGTTTGTGAAAAC |
| | | ATGTGTCCCGCCAGCTTATCAAGAGGAAGCAAAGG |
| | | AAAAAAACATTGGCGTTCATGAGCTGCTGAGTGAG |
| | | AAAGCAAACCATCAAGCGCCTGGTGAAAGCGGCTT |
| | | GCTTGCTTTAGATTGGTGGAATGGAAACCGTTCAAC |
| | | TCTTGTTGATGCAGATTTAACAGGGATGCTGCTTGG |
| | | CATGACACTGCTGACGAAGCCTGAAGAGATTTATA |
| | | GAGCGTTAGTTGAAGCGACAGCTTACGGAACCCGG |
| | | ATGATTATCGAAACATTCAAAGAAAGCGGTGTTCC |
| | | GATTGAGGAACTGTTCGCAGCCGGCGGAATAGCTG |
| | | AGAAAAACCCGTTTGTCATGCAGATTTATGCGGAT |
| | | GTGACAAACATGGACATTAAAATCTCTGGTTCACC |
| | | GCAAGCCCCAGCCTTAGGATCTGCCATTTTCGGCGC |
| | | GCTTGCAGCAGGCAAAGAAAAAGGCGGCTACGATG |
| | | ATATCAAAAAGGCAGCGGCGAACATGGGAAAACT |
| | | GAAAGATATAACTTATACGCCAAATGCCGAAAACG |
| | | CCGCGGTTTATGAAAAATTGTACGCTGAATATAAA |
| | | GAGCTGGTTCATTATTTCGGAAAAGAAAACCATGT |
| | | CATGAAGCGTCTGAAAACGATCAAAAATCTTCAAT |
| | | TTTCATCTGCCGCCAAAAAGAATTGATAAAGGGTG |
| | | ATGGAGCATGCTTGAAACATTAAAAAAAGAAGTGC |
| | | TGGCTGCCAACCTGAAGCTTCAAGAGCATCAGCTG |
| | | GTAACCTTTACGTGGGGAAATGTCAGCGGCATTCA |
| | | CCGTGAAAAAGAAAGAATTGTCATCAAACTAGCGG |
| | | AGTCGAATACCAGCGACCTGACAGCCGATGACTTG |
| | | GTTGTTTTGAACCTTGATGGAGAGGTCGTCGAAGG |
| | | CTCGCTTAAACCTTCTTCAGATACACCTACCCATGT |
| | | TTATCTATATAAAGCCTTTCCGAATATCGGGGGAAT |
| | | TGTCCATACCCATTCTCAATGGGCGACAAGCTGGG |
| | | CGCAATCGGGCAGAGACATCCCTCCGTTAGGCACG |
| | | ACCCATGCTGATTATTTTGACAGTGCGATTCCATGT |
| | | ACTCGAGAAATGTACGATGAAGAAATCATTCATGA |
| | | CTACGAACTGAATACAGGAAAAGTCATAGCGGAAA |
| | | CCTTTCAGCATCATAATTACGAACAGGTGCCGGGT |
| | | GTGCTCGTGAATAATCACGGACCGTTCTGCTGGGG |
| | | CACTGACGCCTTAAATGCCATTCATAACGCAGTTGT |
| | | ATTAGAAACGCTTGCCGAAATGGCCTATCACTCCAT |
| | | TATGCTGAACAAGGATGTAACCCCAATCAATACAG |
| | | TCCTGCATGAAAAGCATTTTTATCGAAAACACGGA |
| | | GCAAATGCGTATTATGGCCAGTCATGATACGCCTGT |
| | | GTCACCGGCTGGCATTCTGATTGACTTGGACGGTAC |
| | | TGTATTCAGAGGAAATGAGTTGATCGAAGGAGCAA |
| | | (SEQ ID NO: 83) |
| Xylose | 5.3.1.5 | >gi\|7161892\|emb\|AJ249909.1\| |
| isomerase | | Piromyces sp. E2 mRNA for xylose |
| | | isomerase (xylA gene)(5-1318) |
| | | GTAAATGGCTAAGGAATATTTCCCACAAATTCAAA |
| | | AGATTAAGTTCGAAGGTAAGGATTCTAAGAATCCA |
| | | TTAGCCTTCCACTACTACGATGCTGAAAAGGAAGT |
| | | CATGGGTAAGAAAATGAAGGATTGGTTACGTTTCG |
| | | CCATGGCCTGGTGGCACACTCTTTGCGCCGAAGGT |
| | | GCTGACCAATTCGGTGGAGGTACAAAGTCTTTCCC |
| | | ATGGAACGAAGGTACTGATGCTATTGAAATTGCCA |
| | | AGCAAAAGGTTGATGCTGGTTTCGAAATCATGCAA |
| | | AAGCTTGGTATTCCATACTACTGTTTCCACGATGTT |
| | | GATCTTGTTTCCGAAGGTAACTCTATTGAAGAATAC |
| | | GAATCCAACCTTAAGGCTGTCGTTGCTTACCTCAAG |
| | | GAAAAGCAAAAGGAAACCGGTATTAAGCTTCTCTG |
| | | GAGTACTGCTAACGTCTTCGGTCACAAGCGTTACAT |
| | | GAACGGTGCCTCCACTAACCCAGACTTTGATGTTGT |
| | | CGCCCGTGCTATTGTTCAAATTAAGAACGCCATAG |
| | | ACGCCGGTATTGAACTTGGTGCTGAAAACTACGTCT |
| | | TCTGGGGTGGTCGTGAAGGTTACATGAGTCTCCTTA |
| | | ACACTGACCAAAAGCGTGAAAAGGAACACATGGCC |
| | | ACTATGCTTACCATGGCTCGTGACTACGCTCGTTCC |
| | | AAGGGATTCAAGGGTACTTTCCTCATTGAACCAAA |
| | | GCCAATGGAACCAACCAAGCACCAATACGATGTTG |
| | | ACACTGAAACCGCTATTGGTTTCCTTAAGGCCCACA |
| | | ACTTAGACAAGGACTTCAAGGTCAACATTGAAGTT |
| | | AACCACGCTACTCTTGCTGGTCACACTTTCGAACAC |
| | | GAACTTGCCTGTGCTGTTGATGCTGGTATGCTCGGT |
| | | TCCATTGATGCTAACCGTGGTGACTACCAAAACGG |
| | | TTGGGATACTGATCAATTCCCAATTGATCAATACGA |
| | | ACTCGTCCAAGCTTGGATGGAAATCATCCGTGGTG |
| | | GTGGTTTCGTTACTGGTGGTACCAACTTCGATGCCA |
| | | AGACTCGTCGTAACTCTACTGACCTCGAAGACATC |
| | | ATCATTGCCCACGTTTCTGGTATGGATGCTATGGCT |
| | | CGTGCTCTTGAAAACGCTGCCAAGCTCCTCCAAGA |
| | | ATCTCCATACACCAAGATGAAGAAGGAACGTTACG |
| | | CTTCCTTCGACAGTGGTATTGGTAAGGACTTTGAAG |
| | | ATGGTAAGCTCACCCTCGAACAAGTTTACGAATAC |
| | | GGTAAGAAGAACGGTGAACCAAAGCAAACTTCTGG |
| | | TAAGCAAGAACTCTACGAAGCTATTGTTGCCATGT |
| | | ACCAATAAGTTAATCGTAGTTAAATTGGTAAAATA |
| | | ATTGTAAAATCAATAAACTTGTCAATCCTCCAATCA |
| | | AGTTTAAAAGATCCTATCTCTGTACTAATTAAATAT |
| | | AGTACAAAAAAAAATGTATAAACAAAAAAAAGTCT |
| | | AAAAGACGGAAGAATTTAATTTAGGGAAAAAATAA |
| | | AAATAATAATAAACAATAGATAAATCCTTTATATT |
| | | AGGAAAATGTCCCATTGTATTATTTTCATTTCTACT |
| | | AAAAAAGAAAGTAAATAAAACACAAGAGGAAATT |
| | | TTCCCTTTTTTTTTTTTTTGTAATAAATTTTATGCAA |
| | | ATATAAATATAAATAAAATAATAAAAAAAAAAAA |
| | | AAAAAA |
| | | (SEQ ID NO: 84) |

TABLE 4
SEQ ID numbers of Coding Regions and Proteins for xylose isomerases.
Uniprot accession number (AC) or NCBI GI number given.

| | | SEQ ID NO: | SEQ ID NO: |
|---|---|---|---|
| | | Nucleic | Amino |
| Organism | GI or AC# | Acid | Acid |
| Clavibacter | B0RIF1 | 89 | 90 |
| michiganensis | | | |
| Arthrobacter | 220912923 | 91 | 92 |
| chlorophenolicus | | | |
| Actinosynnema mirum | 226865307 | 93 | 94 |
| Kribbella flavida | 227382478 | 95 | 96 |
| Mycobacterium | 118469437 | 97 | 98 |
| smegmatis | | | |
| Arthrobacter sp. | 60615686 | 99 | 100 |
| Actinomyces | 227497116 | 101 | 102 |
| urogenitalis | | | |
| Streptomyces | 126348424 | 103 | 104 |
| ambofaciens | | | |
| Salinispora arenicola | 159039501 | 105 | 106 |
| Streptomyces sp. | 38141596 | 107 | 108 |
| Meiothermus silvanus | 227989553 | 109 | 110 |
| Actinoplanes sp. | P10654 | 111 | 112 |
| Mobiluncus curtisii | 227493823 | 113 | 114 |
| Herpetosiphon | 159898286 | 115 | 116 |
| aurantiacus | | | |
| Acidothermus | 117929271 | 117 | 118 |
| cellulolyticus | | | |
| Streptomyces coelicolor | Q9L0B8 | 119 | 120 |
| Streptomyces avermitilis | Q93HF3 | 121 | 122 |
| Nocardiopsis | 229207664 | 123 | 124 |
| dassonvillei | | | |
| Nakamurella multipartita | 229221673 | 125 | 126 |
| Xylanimonas | 227427650 | 127 | 128 |
| cellulosilytica | | | |
| Clavibacter | A5CPC1 | 129 | 130 |
| michiganensis | | | |
| Salinispora tropica | 145596104 | 131 | 132 |
| Streptomyces sp. | 197764953 | 133 | 134 |
| Streptomyces | 197776540 | 135 | 136 |
| pristinaespiralis | | | |
| Roseiflexus sp. | 148656997 | 137 | 138 |
| Meiothermus ruber | 227992647 | 139 | 140 |
| Arthrobacter sp. | P12070 | 141 | 142 |
| Thermobaculum | 227374836 | 143 | 144 |
| terrenum | | | |
| Janibacter sp. | 84495191 | 145 | 146 |
| Brachybacterium | 237671435 | 147 | 148 |
| faecium | | | |
| Beutenbergia cavernae | 229821786 | 149 | 150 |
| Geodermatophilus | 227404617 | 151 | 152 |
| obscurus | | | |
| Actinoplanes | P12851 | 153 | 154 |
| missouriensis | | | |
| Streptomyces | P09033 | 155 | 156 |
| violaceusniger | | | |
| Actinomyces | 154508186 | 157 | 158 |
| odontolyticus | | | |
| Mobiluncus mulieris | 227875705 | 159 | 160 |
| Cellulomonas flavigena | 229243977 | 161 | 162 |
| Saccharomonospora | 229886404 | 163 | 164 |
| viridis | | | |
| Streptomyces lividans | Q9RFM4 | 165 | 166 |
| Frankia sp. | 158316430 | 167 | 168 |
| Streptosporangium | 229851079 | 169 | 170 |
| roseum | | | |
| Nocardioides sp. | 119716602 | 171 | 172 |
| Kribbella flavida | 227381155 | 173 | 174 |
| Roseiflexus castenholzii | 156742580 | 175 | 176 |
| Arthrobacter aurescens | 119964059 | 177 | 178 |
| Leifsonia xyli | 50954171 | 179 | 180 |
| Jonesia denitrificans | 227383768 | 181 | 182 |
| Streptomyces | Q93RJ9 | 183 | 184 |
| olivaceoviridis | | | |
| Stackebrandtia | 229862570 | 185 | 186 |
| nassauensis | | | |
| Thermus thermophilus | P26997 | 187 | 188 |
| Acidobacteria bacterium | 94967932 | 189 | 190 |
| Catenulispora acidiphila | 229246901 | 191 | 192 |
| Streptomyces | Q9S3Z4 | 193 | 194 |
| corchorusii | | | |
| Streptomyces | Q9L558 | 195 | 196 |
| thermocyaneoviolaceus | | | |
| marine actinobacterium | 88856315 | 197 | 198 |
| Micromonospora sp. | 237882534 | 199 | 200 |
| Thermobifida fusca | 72162004 | 201 | 202 |
| Herpetosiphon | 159897776 | 203 | 204 |
| aurantiacus | | | |
| Streptomyces griseus | 182434863 | 205 | 206 |
| Mycobacterium | 120406242 | 207 | 208 |
| vanbaalenii | | | |
| Streptomyces | P50910 | 209 | 210 |
| diastaticus | | | |
| Deinococcus | 94972159 | 211 | 212 |
| geothermalis | | | |
| Arthrobacter sp. | A0JXN9 | 213 | 214 |
| Streptomyces | P24300 | 215 | 216 |
| rubiginosus | | | |
| Streptomyces murinus | P37031 | 217 | 218 |
| Thermus caldophilus | 4930285 | * | 219 |
| Thermus caldophilus | P56681 | * | 220 |
| Arthrobacter sp. | 231103 | * | 221 |
| Actinoplanes | 443486 | * | 222 |
| missouriensis | | | |
| Streptomyces | P15587 | * | 223 |
| olivochromogenes | | | |
| Streptomyces | 157879319 | * | 224 |
| olivochromogenes | | | |
| Streptomyces rochei | P22857 | * | 225 |
| Streptomyces | 157881044 | * | 226 |
| olivochromogenes | | | |
| Streptomyces | 7766813 | * | 227 |
| diastaticus | | | |
| Actinoplanes | 349936 | * | 228 |
| missouriensis | | | |
| Arthrobacter sp. | 2914276 | * | 229 |
| Streptomyces albus | P24299 | * | 230 |
| Actinoplanes | 443303 | * | 231 |
| missouriensis | | | |
| Streptomyces | 9256915 | * | 232 |
| diastaticus | | | |
| Actinoplanes | 443526 | * | 233 |
| missouriensis | | | |
| Streptomyces | 21730246 | * | 234 |
| rubiginosus | | | |
| Actinoplanes | 443568 | * | 235 |
| missouriensis | | | |

TABLE 5
SEQ ID numbers of Proteins xylose isomerases.
Uniprot accession number (AC) given for the indicated proteins.

| | | SEQ ID NO: Amino |
|---|---|---|
| Organism | GI or AC# | Acid |
| Salmonella enterica | B4T952 | 236 |
| Klebsiella pneumoniae | P29442 | 237 |
| Sinorhizobium meliloti | Q92LW9 | 238 |
| Escherichia coli | Q7A9X4 | 239 |
| Salmonella enterica | Q5PLM6 | 240 |
| Xanthomonas | Q3BMF2 | 241 |
| campestris | | |
| Pectobacterium | Q6DB05 | 242 |
| atrosepticum | | |
| Rhodopirellula baltica | Q7UVG2 | 243 |
| Xanthomonas | Q8PEW5 | 244 |
| axonopodis | | |
| Xanthomonas oryzae | Q5GUF2 | 245 |
| Pediococcus | Q03HN1 | 246 |
| pentosaceus | | |
| Brucella suis | Q8G204 | 247 |
| Escherichia coli | Q0TBN7 | 248 |
| Bifidobacterium longum | Q8G3Q1 | 249 |
| Brucella canis | A9M9H3 | 250 |
| Burkholderia | A9ARG7 | 251 |
| multivorans | | |
| Brucella ovis | A5VPA1 | 252 |
| Rhizobium etli | B3Q0R5 | 253 |
| Burkholderia | Q13RB8 | 254 |
| xenovorans | | |
| Actinobacillus | A3N3K2 | 255 |
| pleuropneumoniae | | |
| Burkholderia | B4ENA5 | 256 |
| cenocepacia | | |
| Solibacter usitatus | Q022S9 | 257 |
| Brucella abortus | B2SA37 | 258 |
| Rhodobacter | A4WVT8 | 259 |
| sphaeroides | | |
| Thermoanaerobacter | B0K1L3 | 260 |
| sp. | | |
| Yersinia | Q1C0D3 | 261 |
| pseudotuberculosis | | |
| Xanthomonas oryzae | Q5GYQ7 | 262 |
| Bifidobacterium longum | B3DR33 | 263 |
| Thermoanaerobacter | P22842 | 264 |
| pseudethanolicus | | |
| Photobacterium | Q6LUY7 | 265 |
| profundum | | |
| Escherichia coli | B1LJC7 | 266 |
| Agrobacterium | Q8U7G6 | 267 |
| tumefaciens | | |
| Tetragenococcus | O82845 | 268 |
| halophilus | | |
| Salmonella enterica | B4TZ55 | 269 |
| Yersinia | Q8Z9Z1 | 270 |
| pseudotuberculosis | | |
| Yersinia | Q1CDB8 | 271 |
| pseudotuberculosis | | |
| Rhodobacter | A3PNM4 | 272 |
| sphaeroides | | |
| Brucella abortus | Q2YMQ2 | 273 |
| Salmonella enterica | Q8ZL90 | 274 |
| Bacteroides vulgatus | A6L792 | 275 |
| Xanthomonas | Q8PLL9 | 276 |
| axonopodis | | |
| Salmonella enterica | Q57IG0 | 277 |
| Escherichia coli | B7M3I8 | 278 |
| Roseobacter | Q162B6 | 279 |
| denitrificans | | |
| Bacteroides fragilis | Q64U20 | 280 |
| Enterobacter sakazakii | A7MNI5 | 281 |
| Brucella abortus | Q57EI4 | 282 |
| Geobacillus | A4IP67 | 283 |
| thermodenitrificans | | |
| Bacteroides | Q8A9M2 | 284 |
| thetaiotaomicron | | |
| Haemophilus influenzae | A5UCZ3 | 285 |
| Yersinia | B2K7D2 | 286 |
| pseudotuberculosis | | |
| Xanthomonas | Q4UTU6 | 287 |
| campestris | | |
| Haemophilus somnus | B0UT19 | 288 |
| Pseudoalteromonas | Q15PG0 | 289 |
| atlantica | | |
| Escherichia fergusonii | B7LTH9 | 290 |
| Silicibacter sp. | Q1GKQ4 | 291 |
| Salmonella enterica | B5R4P8 | 292 |
| Bifidobacterium | A1A0H0 | 293 |
| adolescentis | | |
| Staphylococcus xylosus | P27157 | 294 |
| Thermotoga maritima | Q9X1Z5 | 295 |
| Salmonella enterica | A9MUV0 | 296 |
| Pseudomonas syringae | Q48J73 | 297 |
| Shigella boydii | Q31V53 | 298 |
| Burkholderia ambifaria | Q0B1U7 | 299 |
| Bacillus | A7Z522 | 300 |
| amyloliquefaciens | | |
| Haemophilus influenzae | A5UIN7 | 301 |
| Bacillus megaterium | O08325 | 302 |
| Arabidopsis thaliana | Q9FKK7 | 303 |
| Escherichia coli | Q3YVV0 | 304 |
| Bacteroides fragilis | Q5LCV9 | 305 |
| Pseudomonas | Q3KDW0 | 306 |
| fluorescens | | |
| Escherichia coli | B1X8I1 | 307 |
| Bacillus subtilis | P04788 | 308 |
| Xanthomonas | Q4UNZ4 | 309 |
| campestris | | |
| Pseudomonas syringae | Q4ZSF5 | 310 |
| Sinorhizobium medicae | A6UD89 | 311 |
| Ochrobactrum anthropi | A6X4G3 | 312 |
| Burkholderia | Q2SW40 | 313 |
| thailandensis | | |
| Salmonella enterica | B5EX72 | 314 |
| Thermotoga sp. | B1LB08 | 315 |
| Bacillus cereus | Q739D2 | 316 |
| Salmonella enterica | B4SWK9 | 317 |
| Salmonella enterica | Q7C637 | 318 |
| Enterococcus faecalis | Q7C3R3 | 319 |
| Thermotoga neapolitana | P45687 | 320 |
| Escherichia coli | B7MES1 | 321 |
| Photorhabdus | Q7N4P7 | 322 |
| luminescens | | |
| Enterobacter sp. | A4W566 | 323 |
| Burkholderia | B1KB47 | 324 |
| cenocepacia | | |
| Bacillus licheniformis | P77832 | 325 |
| Geobacillus | P54273 | 326 |
| stearothermophilus | | |
| Brucella abortus | Q8YFX5 | 327 |
| Rhizobium | Q1MBL8 | 328 |
| leguminosarum | | |
| Yersinia enterocolitica | A1JT10 | 329 |
| Serratia proteamaculans | A8G7W8 | 330 |
| Yersinia | A7FP68 | 331 |
| pseudotuberculosis | | |
| Escherichia coli | B7NEL7 | 332 |
| Yersinia pestis | A9R5Q1 | 333 |
| Fervidobacterium | Q6T6K9 | 334 |
| gondwanense | | |
| Xanthomonas | Q8P3H1 | 335 |
| campestris | | |
| Rhizobium | B5ZQV6 | 336 |
| leguminosarum | | |
| Bradyrhizobium | Q89VC7 | 337 |
| japonicum | | |
| Mesorhizobium sp. | Q11EH9 | 338 |
| Actinobacillus | B3H2X9 | 339 |
| pleuropneumoniae | | |
| Yersinia | Q663Y3 | 340 |
| pseudotuberculosis | | |
| Xanthomonas | Q8P9T9 | 341 |
| campestris | | |
| Burkholderia | A0KE56 | 342 |
| cenocepacia | | |
| Oceanobacillus | Q8ELU7 | 343 |
| iheyensis | | |
| Brucella suis | B0CKM9 | 344 |
| Thermoanaerobacterium | P29441 | 345 |
| thermosaccharolyticum | | |
| Burkholderia phymatum | B2JFE9 | 346 |
| Yersinia | B1JH40 | 347 |
| pseudotuberculosis | | |
| Bacillus sp. | P54272 | 348 |
| Lactococcus lactis | Q02Y75 | 349 |
| Novosphingobium | Q2GAB9 | 350 |
| aromaticivorans | | |
| Lactobacillus brevis | P29443 | 351 |
| Mesorhizobium loti | Q98CR8 | 352 |
| Escherichia coli | A8A623 | 353 |
| Burkholderia | Q1BG90 | 354 |
| cenocepacia | | |
| Thermoanaerobacterium | P19148 | 355 |
| thermosulfurigenes | | |
| Thermotoga petrophila | A5ILR5 | 356 |
| Lactobacillus pentosus | P21938 | 357 |
| Lactococcus lactis | Q9CFG7 | 358 |
| Ruminococcus | Q9S306 | 359 |
| flavefaciens | | |
| Burkholderia | B2T929 | 360 |
| phytofirmans | | |
| Salmonella enterica | B5FLD6 | 361 |
| Lactobacillus brevis | Q03TX3 | 362 |
| Burkholderia ambifaria | B1Z405 | 363 |
| Salmonella enterica | B5RGL6 | 364 |
| Bacillus halodurans | Q9K993 | 365 |
| Bacillus clausii | Q5WKJ3 | 366 |
| Marinomonas sp. | A6VWH1 | 367 |
| Yersinia | A4TS63 | 368 |
| pseudotuberculosis | | |
| Actinobacillus | B0BTI9 | 369 |
| pleuropneumoniae | | |
| Silicibacter pomeroyi | Q5LV46 | 370 |
| Xanthomonas oryzae | Q2NXR2 | 371 |
| Thermoanaerobacterium | P30435 | 372 |
| saccharolyticum | | |
| Escherichia coli | B6I3D6 | 373 |
| Escherichia coli | B5YVL8 | 374 |
| Escherichia coli | B7NP65 | 375 |
| Escherichia coli | B2U560 | 376 |
| Escherichia coli | B1IZM7 | 377 |
| Rhizobium etli | Q2K433 | 378 |
| Escherichia coli | P00944 | 379 |
| Hordeum vulgare | Q40082 | 380 |
| Dinoroseobacter shibae | A8LP53 | 381 |
| Rhodobacter | Q3IYM4 | 382 |
| sphaeroides | | |
| Actinobacillus | A6VLM8 | 383 |
| succinogenes | | |
| Bacillus pumilus | A8FE33 | 384 |
| Escherichia coli | Q8FCE3 | 385 |
| Pseudomonas syringae | Q880Z4 | 386 |
| Burkholderia | A4JSU5 | 387 |
| vietnamiensis | | |
| Escherichia coli | A7ZTB2 | 388 |
| Haemophilus influenzae | P44398 | 389 |
| Haemophilus influenzae | Q4QLI2 | 390 |
| Listeria welshimeri | A0AF79 | 391 |
| Thermoanaerobacter | Q9KGU2 | 392 |
| yonseiensis | | |
| Geobacillus | Q5KYS6 | 393 |
| kaustophilus | | |
| Mannheimia | Q65PY0 | 394 |
| succiniciproducens | | |

[0087] SEQ ID NO: 395 is the coding region for the Actinoplanes missourinesis xylose isomerase that was codon optimized for Zymomonas.

[0088] SEQ ID NO: 396 the coding region for the Lactobacillus brevis xylose isomerase that was codon optimized for Zymomonas.

[0089] SEQ ID NO: 397 is the coding region for the E. coli xylose isomerase that was codon optimized for Zymomonas.

[0090] SEQ ID NO: 398 is the nucleotide sequence of the codon optimized coding region for Geodermatophilus obscurus xylose isomerase.

[0091] SEQ ID NO: 399 is the nucleotide sequence of the codon optimized coding region for Mycobacterium smegmatis xylose isomerase.

[0092] SEQ ID NO: 74 is the nucleotide sequence of the codon optimized coding region for Salinispora arenicola xylose isomerase.

[0093] SEQ ID NO: 75 is the nucleotide sequence of the codon optimized coding region for Xylanimonas cellulosilytica xylose isomerase.

[0094] Other examples of polynucleotides, and polypeptides that can be used herein include, but are not limited to, polynucleotides and/or polypeptides having at least about 70% to about 75%, about 75% to about 80%, about 80% to about 85%, about 85% to about 90%, about 90% to about 95%, about 96%, about 97%, about 98%, or about 99% sequence identity to any one of the sequences of Tables 3, 4 or 5, wherein such a polynucleotide or gene encodes, or such a polypeptide has enzymatic activity. Still other examples of polynucleotides and polypeptides that can be used in the described isomerization and fermentation processes include, but are not limited to, an active variant, fragment or derivative of any one of the sequences of Tables 3, 4, or 5, wherein such a polynucleotide or gene encodes, or such a polypeptide has enzymatic activity.

[0095] In embodiments, the sequences of other polynucleotides and/or polypeptides can be identified in the literature and in bioinformatics databases well known to the skilled person using sequences disclosed herein and available in the art. For example, such sequences can be identified through BLAST searching of publicly available databases with known enzyme-encoding polynucleotide or polypeptide sequences. In such a method, identities can be based on the Clustal W method of alignment using the default parameters of GAP PENALTY=10, GAP LENGTH PENALTY=0.1, and Gonnet 250 series of protein weight matrix.

[0096] Additionally, the polynucleotide or polypeptide sequences disclosed herein or known in the art can be used to identify other homologs in nature. For example, each of the nucleic acid disclosed herein and fragments of the same can be used to isolate genes encoding homologous proteins. Isolation of homologous genes using sequence-dependent protocols is well known in the art. Examples of sequence-dependent protocols include, but are not limited to: (1) methods of nucleic acid hybridization; (2) methods of DNA and RNA amplification, as exemplified by various uses of nucleic acid amplification technologies [e.g., polymerase chain reaction (PCR), Mullis et al., U.S. Pat. No. 4,683,202; ligase chain reaction (LCR), Tabor et al., Proc. Acad. Sci. USA 82:1074 (1985); or strand displacement amplification (SDA), Walker et al., Proc. Natl. Acad. Sci. U.S.A., 89:392 (1992)]; and (3) methods of library construction and screening by complementation.

[0097] Methods for gene expression in recombinant host cells, including, but not limited to, yeast cells are known in the art (see, for example, Methods in Enzymology, Volume 194, Guide to Yeast Genetics and Molecular and Cell Biology (Part A, 2004, Christine Guthrie and Gerald R. Fink (Eds.), Elsevier Academic Press, San Diego, Calif.). Methods for gene expression by way of episomal plasmids and integrated polynucleotides are both compatible with the presently described methods.

[0098] In some embodiments, the coding region for the enzymes to be expressed can be codon optimized for the target host cell, as well known to one skilled in the art. Expression of genes in recombinant host cells, including but not limited to yeast cells, can require a promoter operably linked to a coding region of interest, and a transcriptional terminator. A number of promoters can be used in constructing expression cassettes for genes, including, but not limited to, the following constitutive promoters suitable for use in yeast: FBA1, TDH3, ADH1, and GPM1; and the following inducible promoters suitable for use in yeast: GAL1, GAL10 and CUP1. Suitable transcriptional terminators that can be used in a chimeric gene construct for expression include, but are not limited to, FBAlt, TDH3t, GPMlt, ERG10t, GALlt, CYClt, and ADHlt.

[0099] Recombinant polynucleotides are typically cloned for expression using the coding sequence as part of a chimeric gene used for transformation, which includes a promoter operably linked to the coding sequence and a termination control region. The coding region can be from the host cell for transformation and combined with regulatory sequences that are not native to the natural gene encoding the protein. Alternatively, the coding region can be from another host cell.

[0100] Vectors useful for the transformation of a variety of host cells are common and described in the literature. Typically the vector contains a selectable marker and sequences allowing autonomous replication or chromosomal integration in the desired host. In addition, suitable vectors can comprise a promoter region which harbors transcriptional initiation controls and a transcriptional termination control region, between which a coding region DNA fragment can be inserted, to provide expression of the inserted coding region. Both control regions can be derived from genes homologous to the transformed host cell, although it is to be understood that such control regions can also be derived from genes that are not native to the specific species chosen as a production host.

[0101] In embodiments, suitable promoters, transcriptional terminators, and enzyme coding regions can be cloned into E. coli-yeast shuttle vectors, and transformed into yeast cells. Such vectors allow strain propagation in both E. coli and yeast strains, and can contain a selectable marker and sequences allowing autonomous replication or chromosomal integration in the desired host. Typically used plasmids in yeast include, but are not limited to, shuttle vectors pRS423, pRS424, pRS425, and pRS426 (American Type Culture Collection, Rockville, Md.), which contain an E. coli replication origin (e.g., pMB1), a yeast 2-micron origin of replication, and a marker for nutritional selection. The selection markers for these four vectors are HIS3 (vector pRS423), TRP1 (vector pRS424), LEU2 (vector pRS425) and URA3 (vector pRS426).

[0102] In embodiments, construction of expression vectors with a chimeric gene encoding the described enzyme can be performed by the gap repair recombination method in yeast. The gap repair cloning approach takes advantage of the highly efficient homologous recombination system in yeast. In embodiments, a yeast vector DNA is digested (e.g., in its multiple cloning site) to create a “gap” in its sequence. A number of insert DNAs of interest are generated that contain an approximately 21 bp sequence at both the 5′ and the 3′ ends that sequentially overlap with each other, and with the 5′ and 3′ terminus of the vector DNA. For example, to construct a yeast expression vector for “Gene X,” a yeast promoter and a yeast terminator are selected for the expression cassette. The promoter and terminator are amplified from the yeast genomic DNA, and Gene X is either PCR amplified from its source organism or obtained from a cloning vector comprising Gene X sequence. There is at least a 21 bp overlapping sequence between the 5′ end of the linearized vector and the promoter sequence, between the promoter and Gene X, between Gene X and the terminator sequence, and between the terminator and the 3′ end of the linearized vector. The “gapped” vector and the insert DNAs are then co-transformed into a yeast strain and plated on the medium containing the appropriate compound mixtures that allow complementation of the nutritional selection markers on the plasmids. The presence of correct insert combinations can be confirmed by PCR mapping using plasmid DNA prepared from the selected cells. The plasmid DNA isolated from yeast (usually low in concentration) can then be transformed into an E. coli strain, e.g. TOP10, followed by mini preps and restriction mapping to further verify the plasmid construct. Finally the construct can be verified by DNA sequence analysis.

[0103] Like the gap repair technique, integration into the yeast genome also takes advantage of the homologous recombination system in yeast. In embodiments, a cassette containing a coding region plus control elements (promoter and terminator) and auxotrophic marker is PCR-amplified with a high-fidelity DNA polymerase using primers that hybridize to the cassette and contain 40-70 base pairs of sequence homology to the regions 5′ and 3′ of the genomic locus where insertion is desired. The PCR product is then transformed into yeast and plated on medium containing the appropriate compound mixtures that allow selection for the integrated auxotrophic marker. For example, to integrate “Gene X” into chromosomal location “Y,” the promoter-coding region X-terminator construct is PCR amplified from a plasmid DNA construct and joined to an autotrophic marker (such as URA3) by either SOE PCR or by common restriction digests and cloning. The full cassette, containing the promoter-coding regionX-terminator-URA3 region, is PCR amplified with primer sequences that contain 40-70 bp of homology to the regions 5′ and 3′ of location “Y” on the yeast chromosome. The PCR product is transformed into yeast and selected on growth media lacking uracil. Transformants can be verified either by colony PCR or by direct sequencing of chromosomal DNA.

[0104] The presence of xylulose-producing enzymatic activity (e.g., xylose isomerase, xylulose kinases, etc) in the recombinant host cells disclosed herein can be confirmed using methods known in the art. In a non-limiting example, transformants can be screened by PCR using primers for the enzyme. In another non-limiting example, enzymatic activity can be assayed for in a recombinant host cell disclosed herein that lacks the enzymatic activity endogenously. For example, a polypeptide having enzymatic activity can convert xylose or arabinose into xylulose. In another non-limiting example, enzymatic activity can be confirmed by more indirect methods, such as by assaying for a downstream product in a pathway requiring the enzymatic activity, including, for example, isobutanol production.

[0105] Improving xylulose production by metabolic engineering will enable isobutanol production by fermentation in the absence of exogenous enzymes. Thus, fermentation of 5-carbon sugars to butanol can be improved by adding exogenous enzymes, by recombinantly expressing enzymes, or both. With increased xylulose production, the efficacy of producing isobutanol from 5-carbon sugars is increased.

[0106] In some embodiments, the use of enzymes that convert substrates to xylulose results in a particular xylose: xylulose equilibrium. For example, in some embodiments, the equilibrium is about 5 xylose: 1 xylulose.

[0107] In some embodiments, the enzymes are present in an amount sufficient to convert a substrate to xylulose at a rate of at least about 0.1 g/hour, at least about 0.25 g/hour, at least about 0.5 g/hour, or at least about 1 g/hour.

[0108] The use of enzymes that convert substrates to xylulose allow for increased production of butanol.

[0109] In some embodiments, the use of such enzymes results in an increase in the consumption of 5-carbon sugars. The rate of consumption of 5-carbon sugars can be measured using any means known in the art. In certain embodiments, in which 6-carbon sugars are also consumed, the rate of consumption of 5-carbon sugars can be at least about 0.5%, 0.75%, 1%, 2%, 3%, 4%, 5%, 10%, 20%, 30%, 40%, 50%, 60%, or 70% the rate of consumption of 6-carbon sugars.

[0110] In some embodiments, the microorganisms capable of producing butanol are genetically stable. Chromosomal aberrations and plasmid loss are minimized in genetically stable microorganisms. In some embodiments, the microorganisms capable of producing butanol are genetically stable when grown in industrially relevant cultivation media. In some embodiments, the microorganisms capable of producing butanol are genetically stable when grown in mineral medium. In some embodiments, the microorganisms capable of producing butanol are genetically stable when grown in defined medium. In some embodiments, the microorganisms capable of producing butanol are genetically stable over periods of prolonged continuous culture.

### Isomerization and Fermentation

[0111] Butanol-producing microorganisms can be cultured under any conditions that allow for butanol production. In particular, it has been observed that growth of the microorganism in the presence of aeration followed by fermentation in the absence of respiration increases butanol production (anaerobic or microaerobic fermentation).

[0112] Respiration can be measured using any means known in the art. By way of example, respiration can be assessed by ATP production, carbon dioxide production, and/or oxygen use. Respiration can be inhibited by any means known in the art. For example, inhibitors of respiration can be added to the fermenting composition. Suitable inhibitors of respiration include, by way of example, Antimycin A, cyanide, azide, oligomycin, and rotenone.

[0113] The inhibitor can be present at any concentration that decreases or limits respiration. In some embodiments, the inhibitor is present at a concentration of about 0.1 to about 10 μM. For example, the concentration of the inhibitor can be about 0.1 to about μM, about 0.1 to about 4 μM, about 0.1 to about 3 μM, about 0.1 to about 2 μM, about 0.1 to about 1.5 μM, or about 0.1 to about 1 μM. The concentration of the inhibitor can also be about 0.5 to about 10 μM, about 0.5 to about 5 μM, about 0.5 to about 3 μM, about 0.5 to about 2 μM, about 0.5 to about 1.5 μM, or about 0.5 to about 1 μM. The concentration of the inhibitor can also be about 1 μM.

[0114] The inhibitor can be present at a concentration that is sufficient to reduce respiration to a level that is no more than about 1%, 5%, 10%, 20%, 30%, 40%, 50%, 60%, or 75% of the level of respiration under the same conditions in the absence of the inhibitor.

[0115] In some embodiments, the inhibitor of respiration is Antimycin A. In some embodiments, the Antimycin A is present at a concentration of about 0.1 to about 10 μM. For example, the concentration of the Antimycin A can be about 0.1 to about 5 μM, about 0.1 to about 4 μM, about 0.1 to about 3 μM, about 0.1 to about 2 μM, about 0.1 to about 1.5 μM, or about 0.1 to about 1 μM. The concentration of the Antimycin A can also be about 0.5 to about 10 μM, about 0.5 to about 5 μM, about 0.5 to about 3 μM, about 0.5 to about 2 μM, about 0.5 to about 1.5 μM, or about 0.5 to about 1 μM. The concentration of the Antimycin A can also be about 1 μM.

[0116] The Antimycin A can be present at a concentration that is sufficient to reduce respiration to a level that is no more than about 1%, 5%, 10%, 20%, 30%, 40%, 50%, 60%, or 75% of the level of respiration under the same conditions in the absence of the Antimycin A.

[0117] In some embodiments, the culture conditions are such that the fermentation occurs without respiration in the absence of inhibitors. For example, cells can be cultured in a fermenter under micro-aerobic or anaerobic conditions.

[0118] Other conditions that maximize butanol production can also be provided.

[0119] Typically microorganisms are grown at a temperature in the range of about 20° C. to about 40° C. Conversion of 5-carbon sugars into xylulose (isomerization) and fermentation can be performed at the same or different temperatures. For example, temperatures of about 40° C. can be used for the conversion of 5-carbon sugars into xylulose, and temperatures of about 30° C. can be used for the fermentation of xylulose to butanol. Furthermore, temperatures of about 30° C. to about 40° C., about 31° C. to about 39° C., about 32° C. to about 38° C., about 32° C. to about 37° C., about 33° C. to about 36° C., or about 33° C. to about 35° C. can be used for both conversion of 5-carbon sugars into xylulose and fermentation of xylulose to butanol. In addition, temperatures of about 32° C. to about 36° C., about 32° C. to about 35° C., about 32° G to about 34° C., about 33° C. to about 36° C., about 33° C. to about 35° C., or about 33° C. to about 34° C. can be used for both conversion of 5-carbon sugars into xylulose and fermentation of xylulose to butanol. In addition, temperatures of about 32° C. to about 36° C., about 33° C. to about 36° C., about 34° C. to about 36° C., about 33° C. to about 35° C., about 33° C. to about 35° C., or about 34° C. to about 35° C. can be used for both conversion of 5-carbon sugars into xylulose and fermentation of xylulose to butanol. In some embodiments, a temperature of about 33° C. to about 35° C. or a temperature of about 34° C. is used to convert 5-carbon sugars to xylulose and to ferment xylulose to butanol.

[0120] Suitable pH ranges for the microorganisms are about pH 3.0 to about pH 9.0. Conversion of 5-carbon sugars into xylulose (isomerization) and fermentation can be performed at the same or different pH. In some embodiments, the isomerization occurs at a pH of about pH 5.0 to about pH 8.0, about pH 5.0 to about pH 7.0, about pH 6.0 to about pH 8.0, about pH 6.0 to about pH 7.0, or about 7.0. In some embodiments, the fermentation occurs at a pH of about pH 3.0 to about pH 7.0, about pH 4.0 to about pH 6.0, about pH 4.0 to about pH 5.0.

[0121] In some embodiments, isomerization and fermentation occur at a pH of about pH 4.0 to about pH 8.0, about pH 5.0 to about pH 7.0, or about pH 6.0. In some embodiments, isomerization and fermentation occur at a pH of about pH 5.0 to about pH 8.0, or about pH 6.0 to about pH 8.0. In some embodiments, isomerization and fermentation occur at a pH that is about pH 4.0 to about pH 7.0, about pH 4.0 to about pH 6.0. In some embodiments, isomerization and fermentation occur at a pH that is about pH 6.0.

[0122] In addition, fermentation media must contain suitable minerals, salts, cofactors, buffers and other components, known to those skilled in the art, suitable for the growth of the cultures and promotion of an enzymatic pathway described herein. Non-limiting examples of media that can be used include yeast extract-peptone, a defined mineral medium, yeast nitrogen base (YNB), synthetic complete (SC), M122C, MOPS, SOB, TSY, YMG, YPD, 2XYT, LB, M17, or M9 minimal media. Other examples of media that can be used include solutions containing potassium phosphate and/or sodium phosphate. Suitable media can be supplemented with NADH or NADPH. Other suitable growth media in the present invention are common commercially prepared media such as Luria Bertani (LB) broth, Sabouraud Dextrose (SD) broth, Yeast Medium (YM) broth, or broth that includes yeast nitrogen base, ammonium sulfate, and dextrose (as the carbon/energy source) or YPD Medium, a blend of peptone, yeast extract, and dextrose in optimal proportions for growing most Saccharomyces cerevisiae strains. Other defined or synthetic growth media can also be used, and the appropriate medium for growth of the particular microorganism will be known by one skilled in the art of microbiology or fermentation science.

[0123] In some embodiments, the fermentation media does not contain yeast extract.

[0124] In some embodiments, antibiotics are included. For example, methods which use an exogenous source of an xylulose-producing enzyme can introduce bacterial contaminants. For example, antibiotics such as Penicillins (e.g., Penicillin G or Penicillin V), Tetracyclines, or Cephalosporins (e.g., Cephalosporin C), virginiamycin, and chloramphenicol can be used. In some embodiments, the antibiotic is present in an amount sufficient to inhibit bacterial growth. In some embodiments, the antibiotic is present in an amount that does not affect yeast growth. In some embodiments, the antibiotic is present at a concentration of about 5, 10, 15, 20, 25, 30, 35, 40, 45, or 50 μg/L.

[0125] In some embodiments, the compositions are cultured for at least about 20 hours, at least about 30 hours, at least about 40 hours, at least about 50 hours, at least about 60 hours, at least about 70 hours, at least about 80 hours, at least about 90 hours, at least about 100 hours, at least about 120 hours, at least about 140 hours, at least about 160 hours, at least about 180 hours, or at least about 200 hours.

[0126] It is contemplated that the production of isobutanol, or other products, can be practiced using batch, fed-batch or continuous processes and that any known mode of fermentation would be suitable. Additionally, it is contemplated that cells can be immobilized on a substrate or in a matrix as whole cell catalysts and subjected to fermentation conditions for isobutanol production.

### Isobutanol Production

[0127] Methods for the production of butanol using 5-carbon sugars are described herein. In some embodiments, the butanol is isobutanol.

[0128] For example, butanol can be produced from 5-carbon sugars by (a) providing a composition comprising a microorganism capable of producing butanol and an enzyme or combination of enzymes capable of converting a substrate to xylulose; (b) contacting the composition with a source of 5-carbon sugars; and (c) culturing the yeast under conditions that limits yeast respiration.

[0129] Thus, compositions for producing butanol from 5-carbon sugars are also provided. The compositions comprise (a) a yeast capable of producing butanol; (b) an enzyme or combination of enzymes capable of converting a 5-carbon sugar to xylulose; (c) a source of 5-carbon sugars; and (d) a fermentation media.

[0130] In some embodiments, the butanol or isobutanol is produced at a particular yield or rate.

[0131] Thus, the specific isobutanol production rate can be at least about 0.10 g/g/h (grams of isobutanol per gram dry cell weight per hour), at least about 0.11 g/g/h, at least about 0.12 g/g/h, at least about 0.13 g/g/h, at least about 0.14 g/g/h, at least about 0.15 g/g/h, at least about 0.16 g/g/h, at least about 0.17 g/g/h, at least about 0.18 g/g/h, at least about 0.19 g/g/h, at least about 0.20 g/g/h, at least about 0.25 g/g/h, at least about 0.30 g/g/h, at least about 0.35 g/g/h, at least about 0.40 g/g/h, at least about 0.45 g/g/h, at least about 0.50 g/g/h, at least about 0.75 g/g/hr, or at least about 1.0 g/g/hr. The specific isobutanol production rate can also be about 0.05 g/g/h to about 1.0 g/g/h, about 0.05 g/g/h to about 0.75 g/g/h, or about 0.05 g/g/h to about 0.50 g/g/h. The specific isobutanol production rate can also be about 0.10 g/g/h to about 1.0 g/g/h, about 0.10 g/g/h to about 0.75 g/g/h, or about 0.10 to about 0.50 g/g/h. The specific isobutanol production rate can also be about 0.15 g/g/h to about 1.0 g/g/h, about 0.15 g/g/h to about 0.75 g/g/h, or about 0.15 g/g/h to about 0.5 g/g/h.

[0132] In certain embodiments, the production provides a yield of greater than about 10% of theoretical, at a yield of greater than about 20% of theoretical, at a yield of greater than about 25% of theoretical, at a yield of greater than about 30% of theoretical, at a yield of greater than about 40% of theoretical, at a yield of greater than about 50% of theoretical, at a yield of greater than about 60% of theoretical, at a yield of greater than about 70% of theoretical, at a yield of greater than about 75% of theoretical, at a yield of greater than about 80% of theoretical at a yield of greater than about 85% of theoretical, at a yield of greater than about 90% of theoretical, at a yield of greater than about 95% of theoretical, at a yield of greater than about 96% of theoretical, at a yield of greater than about 97% of theoretical, at a yield of greater than about 98% of theoretical, at a yield of greater than about 99% of theoretical, or at a yield of about 100% of theoretical.

[0133] In certain embodiments, where both isobutanol and ethanol are produced, the rate of isobutanol production can be at and the rate of isobutanol will decrease in the presence of ethanol production.

### Microorganisms

[0134] According to the methods described herein, any microorganism capable of producing butanol can be used. For example, in some embodiments, the microorganism is a yeast cell capable of producing butanol. In some embodiments, the yeast cell is a member of a genus selected from the group consisting of: Saccharomyces, Schizosaccharomyces, Hansenula, Candida, Kluyveromyces, Yarrowia, Issatchenkia, and Pichia. In still another aspect, the yeast cell is Saccharomyces cerevisiae.

[0135] The microorganism can be genetically altered in order to allow it to produce butanol. Biosynthetic pathways for the production of isobutanol that may be used include those described in U.S. Pat. No. 7,993,889, which is incorporated herein by reference. For example, the microorganism capable of producing butanol can comprise a polynucleotide that encodes a polypeptide that catalyzes the conversion of: (a) pyruvate to acetolactate; (b) acetolactate to 2,3-dihydroxyisovalerate; (c) 2,3-dihydroxyisovalerate to 2-ketoisovalerate; (d) 2-ketoisovalerate to isobutyraldehyde; or (e) isobutyraldehyde to isobutanol. In some embodiments, the microorganism comprises polynucleotides that encode polypeptides that catalyzes the conversion of: (a) pyruvate to acetolactate; (b) acetolactate to 2,3-dihydroxyisovalerate; (c) 2,3-dihydroxyisovalerate to 2-ketoisovalerate; (d) 2-ketoisovalerate to isobutyraldehyde; and (e) isobutyraldehyde to isobutanol. In some embodiments, the microorganism comprises polynucleotides encoding polypeptides having acetolactate synthase, keto acid reductoisomerase, dihydroxy acid dehydratase, ketoisovalerate decarboxylase, and/or alcohol dehydrogenase activity.

[0136] The microorganism capable of producing butanol can comprise a polynucleotide that encodes a polypeptide that catalyzes the conversion of: (a) pyruvate to acetolactate; (b) acetolactate to 2,3-dihydroxyisovalerate; (c) 2,3-dihydroxyisovalerate to α-ketoisovalerate; (d) α-ketoisovalerate to valine; (e) valine to isobutylamine; (f) isobutylamine to isobutyraldehyde, (g) isobutyraldehyde to isobutanol. In some embodiments, the microorganism comprises polynucleotides that encode polypeptides that catalyzes the conversion of: (a) pyruvate to acetolactate; (b) acetolactate to 2,3-dihydroxyisovalerate; (c) 2,3-dihydroxyisovalerate to α-ketoisovalerate; (d) α-ketoisovalerate to valine; (e) valine to isobutylamine; (f) isobutylamine to isobutyraldehyde, (g) isobutyraldehyde to isobutanol. In some embodiments, the microorganism comprises polynucleotides encoding polypeptides having acetolactate synthase, ketol-acid reductoisomerase, dihydroxyacid dehydratase, transaminase, valine dehydrogenase, valine decarboxylase, omega transaminase, and/or branched-chain alcohol dehydrogenase activity.

[0137] The microorganism capable of producing butanol can comprise a polynucleotide that encodes a polypeptide that catalyzes the conversion of: (a) pyruvate to acetolactate; (b) acetolactate to 2,3-dihydroxyisovalerate; (c) 2,3-dihydroxyisovalerate to α-ketoisovalerate; (d) α-ketoisovalerate to isobutyryl-CoA; (e) isobutyryl-CoA to isobutyraldehyde; and (f) isobutyraldehyde to isobutanol. In some embodiments, the microorganism comprises polynucleotides that encode polypeptides that catalyzes the conversion of: (a) pyruvate to acetolactate; (b) acetolactate to 2,3-dihydroxyisovalerate; (c) 2,3-dihydroxyisovalerate to α-ketoisovalerate; (d) α-ketoisovalerate to isobutyryl-CoA; (e) isobutyryl-CoA to isobutyraldehyde; and (f) isobutyraldehyde to isobutanol. In some embodiments, the microorganism comprises polynucleotides encoding polypeptides having acetolactate synthase, acetohydroxy acid reductoisomerase, acetohydroxy acid dehydratase, branched-chain keto acid dehydrogenase, acetylating aldehyde dehydrogenase, and/or branched-chain alcohol dehydrogenase activity.

[0138] The microorganism capable of producing butanol can comprise a polynucleotide that encodes a polypeptide that catalyzes the conversion (a) butyryl-CoA to isobutyryl-CoA, (b) isobutyryl-CoA to isobutyraldehyde; and (c) isobutyraldehyde to isobutanol. In some embodiments, the microorganism comprises polynucleotides that encode polypeptides that catalyzes the conversion of: (a) butyryl-CoA to isobutyryl-CoA, (b) isobutyryl-CoA to isobutyraldehyde; and (c) isobutyraldehyde to isobutanol. In some embodiments, the microorganism comprises polynucleotides encoding polypeptides having isobutyryl-CoA mutase, acetylating aldehyde dehydrogenase, and/or branched-chain alcohol dehydrogenase activity, as described in steps k, e, and g in FIG. 1 from U.S. Pat. No. 7,993,889, which is herein incorporated by reference

[0139] Biosynthetic pathways for the production of 1-butanol that may be used include those described in U.S. Appl. Pub. No. 2008/0182308, which is incorporated herein by reference. The microorganism capable of producing butanol can comprise a polynucleotide that encodes a polypeptide that catalyzes the conversion of: (a) acetyl-CoA to acetoacetyl-CoA; (b) acetoacetyl-CoA to 3-hydroxybutyryl-CoA; (c) 3-hydroxybutyryl-CoA to crotonyl-CoA; (d) crotonyl-CoA to butyryl-CoA; (e) butyryl-CoA to butyraldehyde; and (f) butyraldehyde to 1-butanol. In some embodiments, the microorganism comprises polynucleotides that encode polypeptides that catalyzes the conversion of: (a) acetyl-CoA to acetoacetyl-CoA; (b) acetoacetyl-CoA to 3-hydroxybutyryl-CoA; (c) 3-hydroxybutyryl-CoA to crotonyl-CoA; (d) crotonyl-CoA to butyryl-CoA; (e) butyryl-CoA to butyraldehyde; and (f) butyraldehyde to 1-butanol. In some embodiments, the microorganism comprises polynucleotides encoding polypeptides having acetyl-CoA acetyl transferase, 3-hydroxybutyryl-CoA dehydrogenase, crotonase, butyryl-CoA dehydrogenase, butyraldehyde dehydrogenase, and/or butanol dehydrogenase activity.

[0140] Biosynthetic pathways for the production of 2-butanol that may be used include those described in U.S. Appl. Pub. No. 2007/0259410 and U.S. Appl. Pub. No. 2009/0155870, which are incorporated herein by reference. The microorganism capable of producing butanol can comprise a polynucleotide that encodes a polypeptide that catalyzes the conversion of: (a) pyruvate to alpha-acetolactate; (b) alpha-acetolactate to acetoin; (c) acetoin to 3-amino-2-butanol; (d) 3-amino-2-butanol to 3-amino-2-butanol phosphate; (e) 3-amino-2-butanol phosphate to 2-butanone; and (f) 2-butanone to 2-butanol. In some embodiments, the microorganism comprises polynucleotides that encode polypeptides that catalyzes the conversion of: (a) pyruvate to alpha-acetolactate; (b) alpha-acetolactate to acetoin; (c) acetoin to 3-amino-2-butanol; (d) 3-amino-2-butanol to 3-amino-2-butanol phosphate; (e) 3-amino-2-butanol phosphate to 2-butanone; and (f) 2-butanone to 2-butanol. In some embodiments, the microorganism comprises polynucleotides encoding polypeptides having acetolactate synthase, acetolactate decarboxylase, acetonin aminase, aminobutanol kinase, aminobutanol phosphate phosphorylase, and/or butanol dehydrogenase activity.

[0141] The microorganism capable of producing butanol can comprise a polynucleotide that encodes a polypeptide that catalyzes the conversion of: (a) pyruvate to alpha-acetolactate; (b) alpha-acetolactate to acetoin; (c) acetoin to 2,3-butanediol; (d) 2,3-butanediol to 2-butanone; and (e) 2-butanone to 2-butanol. In some embodiments, the microorganism comprises polynucleotides that encode polypeptides that catalyzes the conversion of: (a) pyruvate to alpha-acetolactate; (b) alpha-acetolactate to acetoin; (c) acetoin to 2,3-butanediol; (d) 2,3-butanediol to 2-butanone; and (e) 2-butanone to 2-butanol. In some embodiments, the microorganism comprises polynucleotides encoding polypeptides having acetolactate synthase, acetolactate decarboxylase, butanediol dehydrogenase, dial dehydratase, and/or butanol dehydrogenase activity.

[0142] Biosynthetic pathways for the production of 2-butanone that may be used include those described in U.S. Appl. Pub. No. 2007/0259410 and U.S. Appl. Pub. No. 2009/0155870, which are incorporated herein by reference. The microorganism capable of producing butanol can comprise a polynucleotide that encodes a polypeptide that catalyzes the conversion of: (a) pyruvate to alpha-acetolactate; (b) alpha-acetolactate to acetoin; (c) acetoin to 3-amino-2-butanol; (d) 3-amino-2-butanol to 3-amino-2-butanol phosphate; and (e) 3-amino-2-butanol phosphate to 2-butanone. In some embodiments, the microorganism comprises polynucleotides that encode polypeptides that catalyzes the conversion of: (a) pyruvate to alpha-acetolactate; (b) alpha-acetolactate to acetoin; (c) acetoin to 3-amino-2-butanol; (d) 3-amino-2-butanol to 3-amino-2-butanol phosphate; and (e) 3-amino-2-butanol phosphate to 2-butanone. In some embodiments, the microorganism comprises polynucleotides encoding polypeptides having acetolactate synthase, acetolactate decarboxylase, acetonin aminase, aminobutanol kinase, and/or aminobutanol phosphate phosphorylase activity.

[0143] The microorganism capable of producing butanol can comprise a polynucleotide that encodes a polypeptide that catalyzes the conversion of: (a) pyruvate to alpha-acetolactate; (b) alpha-acetolactate to acetoin; (c) acetoin to 2,3-butanediol; and (d) 2,3-butanediol to 2-butanone. In some embodiments, the microorganism comprises polynucleotides that encode polypeptides that catalyzes the conversion of: (a) pyruvate to alpha-acetolactate; (b) alpha-acetolactate to acetoin; (c) acetoin to 2,3-butanediol; and (d) 2,3-butanediol to 2-butanone. In some embodiments, the microorganism comprises polynucleotides encoding polypeptides having acetolactate synthase, acetolactate decarboxylase, butanediol dehydrogenase, and/or dial dehydratase activity.

[0144] In addition, in some embodiments, the microorganism comprises at least one deletion, mutation, and/or substitution in an endogenous polynucleotide encoding a polypeptide having pyruvate decarboxylase activity. The polypeptide having pyruvate decarboxylase activity can be, by way of example, Pdc1, Pdc5, Pdc6, or any combination thereof. In some embodiments, the microorganism is substantially free of an enzyme having pyruvate decarboxylase activity. A genetic modification which has the effect of reducing glucose repression wherein the yeast production host cell is pdc- is described in U.S. Appl. Publication No. 20110124060, incorporated herein by reference.

[0145] It will be appreciated that microorganisms comprising a butanol biosynthetic pathway as provided herein may further comprise one or more additional modifications. U.S. Appl. Pub. No. 20090305363 (incorporated herein by reference) discloses increased conversion of pyruvate to acetolactate by engineering yeast for expression of a cytosol-localized acetolactate synthase and substantial elimination of pyruvate decarboxylase activity. In some embodiments, the host cells comprise modifications to reduce glycerol-3-phosphate dehydrogenase activity and/or disruption in at least one gene encoding a polypeptide having pyruvate decarboxylase activity or a disruption in at least one gene encoding a regulatory element controlling pyruvate decarboxylase gene expression as described in U.S. Patent Appl. Pub. No. 20090305363 (incorporated herein by reference), modifications to a host cell that provide for increased carbon flux through an Entner-Doudoroff Pathway or reducing equivalents balance as described in U.S. Patent Appl. Pub. No. 20100120105 (incorporated herein by reference). Other modifications include integration of at least one polynucleotide encoding a polypeptide that catalyzes a step in a pyruvate-utilizing biosynthetic pathway. Other modifications include at least one deletion, mutation, and/or substitution in an endogenous polynucleotide encoding a polypeptide having acetolactate reductase activity. In embodiments, the polypeptide having acetolactate reductase activity is YMR226c of Saccharomyces cerevisae or a homolog thereof. Additional modifications include a deletion, mutation, and/or substitution in an endogenous polynucleotide encoding a polypeptide having aldehyde dehydrogenase and/or aldehyde oxidase activity. In embodiments, the polypeptide having aldehyde dehydrogenase activity is ALD6 from Saccharomyces cerevisiae or a homolog thereof. In some embodiments, microorganisms contain a deletion or downregulation of a polynucleotide encoding a polypeptide that catalyzes the conversion of glyceraldehyde-3-phosphate to glycerate 1,3, bisphosphate. In some embodiments, the enzyme that catalyzes this reaction is glyceraldehyde-3-phosphate dehydrogenase.

[0146] In some embodiments, the yeast strain is PNY1504. PNY1504 was derived from CEN.PK 113-7D (CBS 8340; Centraalbureau voor Schimmelcultures (CBS) Fungal Biodiversity Centre, Netherlands) and contains deletions of the following genes: URA3, HIS3, PDC1, PDC5, PDC6, and GPD2. This strain was transformed with plasmids pYZ090 (SEQ ID NO: 1) and pLH468 (SEQ ID NO: 2) to create strain PNY1504 (BP1083, NGC1-070). Plasmids pYZ090 and pLH468 were described in U.S. Provisional Application No. 61/246,844, which is hereby incorporated by reference in its entirety. In some embodiments, the microorganism comprises a polynucleotide encoding one or more polypeptides that function in the pentose phosphate pathway. For example, the polypeptide can be a transketolase, a transaldolase, a ribulose-phosphate 3-epimerase, and/or a ribose-5-phosphate isomerase. Sequences of exemplary pentose phosphate pathway proteins are found in Table 6 below.

TABLE 6
Pentose Phosphate Pathway Enzymes.
Table 6: Pentose Phosphate Pathway Enzymes
Genomic coding region sequence records from Saccharomyces
Genome Database are shown in FASTA format.

| | EC | |
|---|---|---|
| Enzyme | Number | SEQ ID NO |
| Transketolase | 2.2.1.1 | >TKL1 YPR074C Chr 16 |
| | | ATGACTCAATTCACTGACATTGATAAGCTAGCCGTCTCCACC |
| | | ATAAGAATTTTGGCTGTGGACACCGTATCCAAGGCCAACTC |
| | | AGGTCACCCAGGTGCTCCATTGGGTATGGCACCAGCTGCAC |
| | | ACGTTCTATGGAGTCAAATGCGCATGAACCCAACCAACCCA |
| | | GACTGGATCAACAGAGATAGATTTGTCTTGTCTAACGGTCA |
| | | CGCGGTCGCTTTGTTGTATTCTATGCTACATTTGACTGGTTA |
| | | CGATCTGTCTATTGAAGACTTGAAACAGTTCAGACAGTTGG |
| | | GTTCCAGAACACCAGGTCATCCTGAATTTGAGTTGCCAGGT |
| | | GTTGAAGTTACTACCGGTCCATTAGGTCAAGGTATCTCCAAC |
| | | GCTGTTGGTATGGCCATGGCTCAAGCTAACCTGGCTGCCACT |
| | | TACAACAAGCCGGGCTTTACCTTGTCTGACAACTACACCTAT |
| | | GTTTTCTTGGGTGACGGTTGTTTGCAAGAAGGTATTTCTTCA |
| | | GAAGCTTCCTCCTTGGCTGGTCATTTGAAATTGGGTAACTTG |
| | | ATTGCCATCTACGATGACAACAAGATCACTATCGATGGTGC |
| | | TACCAGTATCTCATTCGATGAAGATGTTGCTAAGAGATACG |
| | | AAGCCTACGGTTGGGAAGTTTTGTACGTAGAAAATGGTAAC |
| | | GAAGATCTAGCCGGTATTGCCAAGGCTATTGCTCAAGCTAA |
| | | GTTATCCAAGGACAAACCAACTTTGATCAAAATGACCACAA |
| | | CCATTGGTTACGGTTCCTTGCATGCCGGCTCTCACTCTGTGC |
| | | ACGGTGCCCCATTGAAAGCAGATGATGTTAAACAACTAAAG |
| | | AGCAAATTCGGTTTCAACCCAGACAAGTCCTTTGTTGTTCCA |
| | | CAAGAAGTTTACGACCACTACCAAAAGACAATTTTAAAGCC |
| | | AGGTGTCGAAGCCAACAACAAGTGGAACAAGTTGTTCAGCG |
| | | AATACCAAAAGAAATTCCCAGAATTAGGTGCTGAATTGGCT |
| | | AGAAGATTGAGCGGCCAACTACCCGCAAATTGGGAATCTAA |
| | | GTTGCCAACTTACACCGCCAAGGACTCTGCCGTGGCCACTA |
| | | GAAAATTATCAGAAACTGTTCTTGAGGATGTTTACAATCAA |
| | | TTGCCAGAGTTGATTGGTGGTTCTGCCGATTTAACACCTTCT |
| | | AACTTGACCAGATGGAAGGAAGCCCTTGACTTCCAACCTCC |
| | | TTCTTCCGGTTCAGGTAACTACTCTGGTAGATACATTAGGTA |
| | | CGGTATTAGAGAACACGCTATGGGTGCCATAATGAACGGTA |
| | | TTTCAGCTTTCGGTGCCAACTACAAACCATACGGTGGTACTT |
| | | TCTTGAACTTCGTTTCTTATGCTGCTGGTGCCGTTAGATTGTC |
| | | CGCTTTGTCTGGCCACCCAGTTATTTGGGTTGCTACACATGA |
| | | CTCTATCGGTGTCGGTGAAGATGGTCCAACACATCAACCTA |
| | | TTGAAACTTTAGCACACTTCAGATCCCTACCAAACATTCAAG |
| | | TTTGGAGACCAGCTGATGGTAACGAAGTTTCTGCCGCCTAC |
| | | AAGAACTCTTTAGAATCCAAGCATACTCCAAGTATCATTGCT |
| | | TTGTCCAGACAAAACTTGCCACAATTGGAAGGTAGCTCTAT |
| | | TGAAAGCGCTTCTAAGGGTGGTTACGTACTACAAGATGTTG |
| | | CTAACCCAGATATTATTTTAGTGGCTACTGGTTCCGAAGTGT |
| | | CTTTGAGTGTTGAAGCTGCTAAGACTTTGGCCGCAAAGAAC |
| | | ATCAAGGCTCGTGTTGTTTCTCTACCAGATTTCTTCACTTTTG |
| | | ACAAACAACCCCTAGAATACAGACTATCAGTCTTACCAGAC |
| | | AACGTTCCAATCATGTCTGTTGAAGTTTTGGCTACCACATGT |
| | | TGGGGCAAATACGCTCATCAATCCTTCGGTATTGACAGATTT |
| | | GGTGCCTCCGGTAAGGCACCAGAAGTCTTCAAGTTCTTCGG |
| | | TTTCACCCCAGAAGGTGTTGCTGAAAGAGCTCAAAAGACCA |
| | | TTGCATTCTATAAGGGTGACAAGCTAATTTCTCCTTTGAAAA |
| | | AAGCTTTCTAA |
| | | (SEQ ID NO: 85) |
| Transaldolase | 2.2.1.2 | >TAL1 YLR354C Chr 12 |
| | | ATGTCTGAACCAGCTCAAAAGAAACAAAAGGTTGCTAACAA |
| | | CTCTCTAGAACAATTGAAAGCCTCCGGCACTGTCGTTGTTGC |
| | | CGACACTGGTGATTTCGGCTCTATTGCCAAGTTTCAACCTCA |
| | | AGACTCCACAACTAACCCATCATTGATCTTGGCTGCTGCCAA |
| | | GCAACCAACTTACGCCAAGTTGATCGATGTTGCCGTGGAAT |
| | | ACGGTAAGAAGCATGGTAAGACCACCGAAGAACAAGTCGA |
| | | AAATGCTGTGGACAGATTGTTAGTCGAATTCGGTAAGGAGA |
| | | TCTTAAAGATTGTTCCAGGCAGAGTCTCCACCGAAGTTGAT |
| | | GCTAGATTGTCTTTTGACACTCAAGCTACCATTGAAAAGGCT |
| | | AGACATATCATTAAATTGTTTGAACAAGAAGGTGTCTCCAA |
| | | GGAAAGAGTCCTTATTAAAATTGCTTCCACTTGGGAAGGTA |
| | | TTCAAGCTGCCAAAGAATTGGAAGAAAAGGACGGTATCCAC |
| | | TGTAATTTGACTCTATTATTCTCCTTCGTTCAAGCAGTTGCCT |
| | | GTGCCGAGGCCCAAGTTACTTTGATTTCCCCATTTGTTGGTA |
| | | GAATTCTAGACTGGTACAAATCCAGCACTGGTAAAGATTAC |
| | | AAGGGTGAAGCCGACCCAGGTGTTATTTCCGTCAAGAAAAT |
| | | CTACAACTACTACAAGAAGTACGGTTACAAGACTATTGTTA |
| | | TGGGTGCTTCTTTCAGAAGCACTGACGAAATCAAAAACTTG |
| | | GCTGGTGTTGACTATCTAACAATTTCTCCAGCTTTATTGGAC |
| | | AAGTTGATGAACAGTACTGAACCTTTCCCAAGAGTTTTGGA |
| | | CCCTGTCTCCGCTAAGAAGGAAGCCGGCGACAAGATTTCTT |
| | | ACATCAGCGACGAATCTAAATTCAGATTCGACTTGAATGAA |
| | | GACGCTATGGCCACTGAAAAATTGTCCGAAGGTATCAGAAA |
| | | ATTCTCTGCCGATATTGTTACTCTATTCGACTTGATTGAAAA |
| | | GAAAGTTACCGCTTAA |
| | | (SEQ ID NO: 86) |
| Ribulose- | 5.1.3.1 | >RPE1 YJL121C Chr 10 |
| phosphate 3- | | ATGGTCAAACCAATTATAGCTCCCAGTATCCTTGCTTCTGAC |
| epimerase | | TTCGCCAACTTGGGTTGCGAATGTCATAAGGTCATCAACGC |
| | | CGGCGCAGATTGGTTACATATCGATGTCATGGACGGCCATT |
| | | TTGTTCCAAACATTACTCTGGGCCAACCAATTGTTACCTCCC |
| | | TACGTCGTTCTGTGCCACGCCCTGGCGATGCTAGCAACACA |
| | | GAAAAGAAGCCCACTGCGTTCTTCGATTGTCACATGATGGT |
| | | TGAAAATCCTGAAAAATGGGTCGACGATTTTGCTAAATGTG |
| | | GTGCTGACCAATTTACGTTCCACTACGAGGCCACACAAGAC |
| | | CCTTTGCATTTAGTTAAGTTGATTAAGTCTAAGGGCATCAAA |
| | | GCTGCATGCGCCATCAAACCTGGTACTTCTGTTGACGTTTTA |
| | | TTTGAACTAGCTCCTCATTTGGATATGGCTCTTGTTATGACT |
| | | GTGGAACCTGGGTTTGGAGGCCAAAAATTCATGGAAGACAT |
| | | GATGCCAAAAGTGGAAACTTTGAGAGCCAAGTTCCCCCATT |
| | | TGAATATCCAAGTCGATGGTGGTTTGGGCAAGGAGACCATC |
| | | CCGAAAGCCGCCAAAGCCGGTGCCAACGTTATTGTCGCTGG |
| | | TACCAGTGTTTTCACTGCAGCTGACCCGCACGATGTTATCTC |
| | | CTTCATGAAAGAAGAAGTCTCGAAGGAATTGCGTTCTAGAG |
| | | ATTTGCTAGATTAG |
| | | (SEQ ID NO: 87) |
| Ribose-5- | 5.3.1.6 | >RKI1 YOR095C Chr 15 |
| phosphate | | ATGGCTGCCGGTGTCCCAAAAATTGATGCGTTAGAATCTTTG |
| isomerase | | GGCAATCCTTTGGAGGATGCCAAGAGAGCTGCAGCATACAG |
| | | AGCAGTTGATGAAAATTTAAAATTTGATGATCACAAAATTA |
| | | TTGGAATTGGTAGTGGTAGCACAGTGGTTTATGTTGCCGAA |
| | | AGAATTGGACAATATTTGCATGACCCTAAATTTTATGAAGT |
| | | AGCGTCTAAATTCATTTGCATTCCAACAGGATTCCAATCAAG |
| | | AAACTTGATTTTGGATAACAAGTTGCAATTAGGCTCCATTGA |
| | | ACAGTATCCTCGCATTGATATAGCGTTTGACGGTGCTGATGA |
| | | AGTGGATGAGAATTTACAATTAATTAAAGGTGGTGGTGCTT |
| | | GTCTATTTCAAGAAAAATTGGTTAGTACTAGTGCTAAAACCT |
| | | TCATTGTCGTTGCTGATTCAAGAAAAAAGTCACCAAAACAT |
| | | TTAGGTAAGAACTGGAGGCAAGGTGTTCCCATTGAAATTGT |
| | | ACCTTCCTCATACGTGAGGGTCAAGAATGATCTATTAGAAC |
| | | AATTGCATGCTGAAAAAGTTGACATCAGACAAGGAGGTTCT |
| | | GCTAAAGCAGGTCCTGTTGTAACTGACAATAATAACTTCATT |
| | | ATCGATGCGGATTTCGGTGAAATTTCCGATCCAAGAAAATT |
| | | GCATAGAGAAATCAAACTGTTAGTGGGCGTGGTGGAAACAG |
| | | GTTTATTCATCGACAACGCTTCAAAAGCCTACTTCGGTAATT |
| | | CTGACGGTAGTGTTGAAGTTACCGAAAAGTGA |
| | | (SEQ ID NO: 88) |

[0147] In addition, the microorganism can comprise any combination of polynucleotides encoding polypeptides that function in the pentose phosphate pathway.

[0148] In some embodiments, the compositions used herein comprise both microorganisms capable of producing butanol and microorganisms that are not capable of producing butanol. Lignocellulosic hydrolysates can inhibit the growth of butanol-producing microorganisms and can do so to a greater extent than they inhibit the growth of non-butanol-producing microorganisms. The methods described herein, maximize the growth and yield of butanol-producing microorganisms.

[0149] In some embodiments, the butanol-producing microorganisms are present in a composition (e.g., a fermenting composition) at a concentration that is at least equal to the concentration of microorganisms that are not capable of producing butanol. In addition, the microorganisms capable of producing butanol can be present at a concentration that is greater than the concentration of microorganisms that are not capable of producing butanol. The microorganisms capable of producing butanol can be present at a concentration that is at least twice the concentration of microorganisms that are not capable of producing butanol.

Methods for Isobutanol Isolation from the Fermentation Medium

[0150] According to the methods described herein, butanol can be obtained from 5-carbon sugars by a method comprising (a) providing a composition comprising a microorganism capable of producing butanol and an enzyme or enzymes capable of converting a 5-carbon sugar to xylulose; (b) contacting the composition with a source of 5-carbon sugars; (c) culturing the microorganism under conditions that limits respiration; and (d) purifying isobutanol from the culture.

[0151] Methods described herein can be used in conjunction with methods known in the art. Methods that can be used in conjunction with methods disclosed herein are disclosed in U.S. Provisional Application No. 61/356,290, filed on Jun. 18, 2010; as well as U.S. Provisional Application No. 61/368,451, filed on Jul. 28, 2010; U.S. Provisional Application No. 61/368,436, filed on Jul. 28, 2010; U.S. Provisional Application No. 61/368,444, filed on Jul. 28, 2010; U.S. Provisional Application No. 61/368,429, filed on Jul. 28, 2010; U.S. Provisional Application No. 61/379,546, filed on Sep. 2, 2010; and U.S. Provisional Application No. 61/440,034, filed on Feb. 7, 2011; the entire contents of which are all herein incorporated by reference.

[0152] Bioproduced isobutanol can be isolated from the fermentation medium using methods known in the art for acetone-butanol-ethanol (ABE) fermentations (see, e.g., Durre, Appl. Microbiol. Biotechnol. 49:639-648 (1998), Groot et al., Process. Biochem. 27:61-75 (1992), and references therein). For example, solids can be removed from the fermentation medium by centrifugation, filtration, decantation, or the like. Then, the isobutanol can be isolated from the fermentation medium using methods such as distillation, azeotropic distillation, liquid-liquid extraction, adsorption, gas stripping, membrane evaporation, or pervaporation.

[0153] Because isobutanol forms a low boiling point, azeotropic mixture with water, distillation can be used to separate the mixture up to its azeotropic composition. Distillation can be used in combination with another separation method to obtain separation around the azeotrope. Methods that can be used in combination with distillation to isolate and purify butanol include, but are not limited to, decantation, liquid-liquid extraction, adsorption, and membrane-based techniques. Additionally, butanol can be isolated using azeotropic distillation using an entrainer (see, e.g., Doherty and Malone, Conceptual Design of Distillation Systems, McGraw Hill, New York, 2001).

[0154] The butanol-water mixture forms a heterogeneous azeotrope so that distillation can be used in combination with decantation to isolate and purify the isobutanol. In this method, the isobutanol containing fermentation broth is distilled to near the azeotropic composition. Then, the azeotropic mixture is condensed, and the isobutanol is separated from the fermentation medium by decantation. The decanted aqueous phase can be returned to the first distillation column as reflux. The isobutanol-rich decanted organic phase can be further purified by distillation in a second distillation column.

[0155] The isobutanol can also be isolated from the fermentation medium using liquid-liquid extraction in combination with distillation. In this method, the isobutanol is extracted from the fermentation broth using liquid-liquid extraction with a suitable solvent. The isobutanol-containing organic phase is then distilled to separate the butanol from the solvent.

[0156] Distillation in combination with adsorption can also be used to isolate isobutanol from the fermentation medium. In this method, the fermentation broth containing the isobutanol is distilled to near the azeotropic composition and then the remaining water is removed by use of an adsorbent, such as molecular sieves (Aden et al. Lignocellulosic Biomass to Ethanol Process Design and Economics Utilizing Co-Current Dilute Acid Prehydrolysis and Enzymatic Hydrolysis for Corn Stover, Report NREL/TP-510-32438, National Renewable Energy Laboratory, June 2002).

[0157] Additionally, distillation in combination with pervaporation can be used to isolate and purify the isobutanol from the fermentation medium. In this method, the fermentation broth containing the isobutanol is distilled to near the azeotropic composition, and then the remaining water is removed by pervaporation through a hydrophilic membrane (Guo et al., J. Membr. Sci. 245, 199-210 (2004)).

[0158] In situ product removal (ISPR) (also referred to as extractive fermentation) can be used to remove butanol (or other fermentative alcohol) from the fermentation vessel as it is produced, thereby allowing the microorganism to produce butanol at high yields. One method for ISPR for removing fermentative alcohol that has been described in the art is liquid-liquid extraction. In general, with regard to butanol fermentation, for example, the fermentation medium, which includes the microorganism, is contacted with an organic extractant at a time before the butanol concentration reaches a toxic level. The organic extractant and the fermentation medium form a biphasic mixture. The butanol partitions into the organic extractant phase, decreasing the concentration in the aqueous phase containing the microorganism, thereby limiting the exposure of the microorganism to the inhibitory butanol.

[0159] Liquid-liquid extraction can be performed, for example, according to the processes described in U.S. Pub. No. 2009/0305370, the disclosure of which is hereby incorporated in its entirety. U.S. Patent Appl. Pub. No. 2009/0305370 describes methods for producing and recovering butanol from a fermentation broth using liquid-liquid extraction, the methods comprising the step of contacting the fermentation broth with a water immiscible extractant to form a two-phase mixture comprising an aqueous phase and an organic phase. Typically, the extractant can be an organic extractant selected from the group consisting of saturated, mono-unsaturated, poly-unsaturated (and mixtures thereof) C₁₂ to C₂₂ fatty alcohols, C₁₂ to C₂₂ fatty acids, esters of C₁₂ to C₂₂ fatty acids, C₁₂ to C₂₂ fatty aldehydes, and mixtures thereof. The extractant(s) for ISPR can be non-alcohol extractants. The ISPR extractant can be an exogenous organic extractant such as oleyl alcohol, behenyl alcohol, cetyl alcohol, lauryl alcohol, myristyl alcohol, stearyl alcohol, 1-undecanol, oleic acid, lauric acid, myristic acid, stearic acid, methyl myristate, methyl oleate, undecanal, lauric aldehyde, 20-methylundecanal, and mixtures thereof.

[0160] In some embodiments, the alcohol can be esterified by contacting the alcohol in a fermentation medium with an organic acid (e.g., fatty acids) and a catalyst (e.g. lipase) capable of esterifying the alcohol with the organic acid. In such embodiments, the organic acid can serve as an ISPR extractant into which the alcohol esters partition. The organic acid can be supplied to the fermentation vessel and/or derived from the biomass supplying fermentable carbon fed to the fermentation vessel. Lipids present in the feedstock can be catalytically hydrolyzed to organic acid, and the same catalyst (e.g., enzymes) can esterify the organic acid with the alcohol. The catalyst can be supplied to the feedstock prior to fermentation, or can be supplied to the fermentation vessel before or contemporaneously with the supplying of the feedstock. When the catalyst is supplied to the fermentation vessel, alcohol esters can be obtained by hydrolysis of the lipids into organic acid and substantially simultaneous esterification of the organic acid with butanol present in the fermentation vessel. Organic acid and/or native oil not derived from the feedstock can also be fed to the fermentation vessel, with the native oil being hydrolyzed into organic acid. Any organic acid not esterified with the alcohol can serve as part of the ISPR extractant. The extractant containing alcohol esters can be separated from the fermentation medium, and the alcohol can be recovered from the extractant. The extractant can be recycled to the fermentation vessel. Thus, in the case of butanol production, for example, the conversion of the butanol to an ester reduces the free butanol concentration in the fermentation medium, shielding the microorganism from the toxic effect of increasing butanol concentration. In addition, unfractionated grain can be used as feedstock without separation of lipids therein, since the lipids can be catalytically hydrolyzed to organic acid, thereby decreasing the rate of build-up of lipids in the ISPR extractant.

[0161] In situ product removal can be carried out in a batch mode or a continuous mode. In a continuous mode of in situ product removal, product is continually removed from the reactor. In a batchwise mode of in situ product removal, a volume of organic extractant is added to the fermentation vessel and the extractant is not removed during the process. For in situ product removal, the organic extractant can contact the fermentation medium at the start of the fermentation forming a biphasic fermentation medium. Alternatively, the organic extractant can contact the fermentation medium after the microorganism has achieved a desired amount of growth, which can be determined by measuring the optical density of the culture. Further, the organic extractant can contact the fermentation medium at a time at which the product alcohol level in the fermentation medium reaches a preselected level. In the case of butanol production according to some embodiments of the present invention, the organic acid extractant can contact the fermentation medium at a time before the butanol concentration reaches a toxic level, so as to esterify the butanol with the organic acid to produce butanol esters and consequently reduce the concentration of butanol in the fermentation vessel. The ester-containing organic phase can then be removed from the fermentation vessel (and separated from the fermentation broth which constitutes the aqueous phase) after a desired effective titer of the butanol esters is achieved. In some embodiments, the ester-containing organic phase is separated from the aqueous phase after fermentation of the available fermentable sugar in the fermentation vessel is substantially complete.

### EXAMPLES

[0162] The present invention is further defined in the following Examples. It should be understood that these Examples, while indicating embodiments of the invention, are given by way of illustration only. From the above discussion and these Examples, one skilled in the art can ascertain the essential characteristics of this invention, and without departing from the spirit and scope thereof, can make various changes and modifications of the invention to adapt it to various uses and conditions.

[0163] All documents cited herein, including journal articles or abstracts, published or corresponding U.S. or foreign patent applications, issued or foreign patents, or any other documents, are each entirely incorporated by reference herein, including all data, tables, figures, and text presented in the cited documents.

### Example 1

### Conversion of Fermentable Carbons in Lignocellulosic Hydrolysates to Isobutanol Methods

[0164] Lignocellulosic hydrolysate (LCH) was produced from ground corn cob that had been pretreated by a dilute ammonia and heat process then enzymatically hydrolyzed with a mixture of commercial cellulase and hemicellulase enzyme preparations at 25% percent pretreated corn cob solids, pH 5.3 and 48° C. for 96 hours, all as described in U.S. Publication No. 2007/0031918A1, which is herein incorporated by reference. The primary sugar and acetate concentrations in the resulting hydrolysate were: 75 g/L glucose; 54 g/L xylose, 6 g/L arabinose, and 5 g/L acetate.

[0165] Two yeast strains were used. The first, CEN.PKI 13-7D, is a wildtype ethanologenic strain. Van Dijken et al., Enzyme Microb Technol 26:706-714 (2000). The second strain, PNY1504 is an isobutanologenic strain. The strain was created from PNY1503 (MATa ura3Δ::loxP his3Δ pdc6Δ pdc1Δ::P[PDC1]-DHADIilvD_Sm-PDClt pdc5Δ::P[PDC5]-ADH|sadB_Ax-PDC5t gpd2Δ::loxP) by transformation with plasmids pYZ090 (alsS-L. lactis KAR1) and pLH468 (IlvD-hADH-KivDy).

[0166] Synthetic Complete-GE medium consisted of Yeast Nitrogen Base w/o amino acids, dropout mix-His-Ura-Trp-Leu (1.4 g/L, Sigma Y2001) plus tryptophan (20 mg/L) and leucine (60 mg/L) (Sherman F, Methods in Enzymology 350:3-41 (2002)), and 3 g/L glucose plus 3 ml/L 190 proof ethanol (Sigma E7023). Liquid medium was buffered to pH 5.5 with 0.1 M MES-KOH. Solid medium for Petri plates was formed with 20 g agar/L.

[0167] Test tubes containing 2 ml of SC-GE medium were inoculated from a plate, and incubated at 30° C. with shaking for 6 hours. Then this pre-culture was used to inoculate 50 ml SC-GE in a 250 ml flask for overnight incubation at 30° C., 250 rpm. Cells were recovered by centrifugation and transferred to 0.10 ml of production medium in 50 ml flasks. Cultures were propagated at 30° C. for 150 hours and sampled periodically for analysis of residual sugar and produced alcohol by HPLC. The production media tested were either LCH or LCH diluted 1:1 with water.

[0168] Before analysis, fermentation samples were passed through a Nanosep MF 0.2 micron centrifugal filter (Pall Life Sciences, Ann Arbor, Mich.) using a Microfuge 18 Centrifuge (Beckman Coulter) set at 13,000 rpm for 3-5 minute. Glucose, xylose, acetic acid, glycerol, ethanol, and isobutanol in the fermentation broth were measured by HPLC with a Waters Alliance HPLC system. The column used was a Transgenomic ION-300 column (#ICE-99-9850, Transgenomic, Inc., Omaha, Nebr.) with a BioRad Micro-Guard Cartridge Cation-H (#125-0129, Bio-Rad, Hercules, Calif.). The column was run at 75° C. and 0.4 mL/min flow rate using 0.01 N H₂SO₄ as solvent. The concentrations of starting sugars and products were determined with a refractive index detector using external standard calibration curves.

### Results

[0169] The isobutanologen, PNY1504, was unable to grow on 1× corn cob hydrolysate. As can be seen in FIG. 1, it grew on diluted hydrolysate at a rate comparable to the wildtype strain on undiluted LCH, and it achieved approximately ⅔ the final biomass concentration of the wildtype strain. FIG. 2 shows the profiles of glucose consumption and isobutanol production by PNY1504. Glucose was consumed from −40 g/L down to a residual concentration of −15 g/L within 24 hours. In that same period, isobutanol was produced with a final titer of 3 g/L, resulting in a yield of 0.12 g·g⁻¹. By comparison, in FIG. 3, the ethanologenic strain is observed to consume the glucose almost completely, from an initial concentration of −75 g/L down to <5 g/L, over a period of >48 hours. It produced approximately 28 g/L ethanol, for a yield of −0.37 g·g⁻¹.

### Example 2

### Conversion of C-5 Sugars to C-4 Alcohol in Defined Medium

### Methods

[0170] Strain PNY1504 was pre-cultured in the defined medium SC-GE as described above, except that the medium was buffered to pH 6. Production cultures used the same SC medium, except either glucose or xylose was added to a final concentration of 35 g/L, and penicillin G (Sigma P3032) was added at 25 μg/ml.

[0171] Unless it is genetically engineered to do so, S. cerevisiae is unable to ferment xylose, but it is able to ferment xylulose. In order to test whether xylose is available for fermentation to isobutanol, it was converted to xylulose in situ by xylose isomerase (10 g/L; Sigma G4166) essentially as described in Lastick S. M., et al., Applied Microbiology and Biotechnology 30:574-579 (1989), Wang P. Y., et al., Biotechnology Letters 2:273-278 (1980) and Chandrakant P & Bisaria V S, Appl Microbiol Biotechnol 53:301-309 (2000).

[0172] Xylulose can be taken up by yeast and metabolized via the pentose phosphate pathway. It has been shown that yeast displays a predominantly respiratory mode of metabolism when grown on xylose, which results in a high biomass yield and low yields of fermentative products. Souto-Maior A M, et al., J Biotechnol. 143:119-23 (2009). Thus, in order to increase flux towards fermentative products, cultures were treated with the respiratory inhibitor antimycin A (1 μM; Sigma A8674).

### Results

[0173] As shown in FIG. 4, the isobutanologen fermented glucose to isobutanol. The hexose was consumed within 24 hours, irrespective of antimycin A treatment. The antimycin A-treated culture achieved a somewhat higher isobutanol titer, ˜3.3 g/L, for a yield of approximately 0.08 g·g⁻¹. Low levels of growth were observed, since a high initial biomass concentration was used to inoculate the production cultures.

[0174] FIG. 5 shows the fermentation profile when xylose was provided as the sole carbon source, along with xylose isomerase. Xylose conversion to xylulose and its subsequent utilization are slower than glucose consumption. By 78 hours, only 10 g/L of xylose had been consumed (indirectly, as xylulose, with which it is in equilibrium due to the presence of xylose isomerase). This consumption profile was not significantly affected by the presence or absence of antimycin A. However, the respiratory inhibitor did reduce biomass accumulation slightly, and a significantly increased production of isobutanol was observed (0.5 vs. 0.1 g/L at 78 hours, respectively). The isobutanol yield was 0.04 g·g⁻¹ in the presence of antimycin A and 0.01 g·g⁻¹ in the absence of the drug.

### Example 3

### Conversion of Xylose in Lignocellulosic Hydrolysates to Isobutanol

### Methods

[0175] This experiment used xylose isomerase to convert xylose present in lignocellulosic hydrolysate (LCH) to xylulose, which is then available for fermentation to isobutanol by isobutanologenic yeast strains. PNY1504 was pre-grown as described above and transferred into 0.5×LCH containing penicillin G at 25 mg/L for cultivation. Xylose isomerase (10 g/L) and/or antimycin A (1 μM) were added as described in the Figure legends. Samples were withdrawn periodically for analysis during the course of 170 hours.

### Results

[0176] FIG. 6 shows the concentrations of glucose, xylose, and xylulose during the fermentation. Glucose was consumed within 48 hours, except when antimycin A was added in the absence of xylose isomerase. Xylose consumption and the formation of xylulose (not shown) required the addition of xylose isomerase, as expected.

[0177] The effective isobutanol titer during the fermentation is shown in FIG. 7. All four cultures made isobutanol from glucose during the first 48 hours, with titers ranging from approximately 4-6 g/L. Subsequently, in the period after glucose was exhausted from the feedstock, the culture treated with both xylose isomerase and antimycin A made the highest amount of isobutanol, through 100 hours. The concentration subsequently declined, presumably due to evaporation of the alcohol. The culture without xylose isomerase continued to gradually accumulate isobutanol throughout the experiment, possibly due to the gradual assimilation of poor carbon sources in the hydrolysate such as acetic acid.

### Example 3

### Recovery of Isobutanol

[0178] The isobutanol produced in the preceding Examples may be recovered by in situ product recovery process in accordance with the methods of U.S. Provisional Application No. 61/356,290, filed on Jun. 18, 2010. The in situ product recovery (ISPR) methods described therein provide for improved butanol production by the removal of inhibitors prior to and during fermentation. The utilization of mixed sugars by the recombinant organism with the ISPR techniques may provide for improvements in butanol production through one or more if increased sugar utilization, decreased inhibitor profiles and increased alcohol product tolerance.

### Example 4

### Construction of Saccharomyces cerevisiae Strain BP1083 (“NGC1-070”; PNY 1504)

[0179] The strain BP1064 was derived from CEN.PK 113-7D (CBS 8340; Centraalbureau voor Schimmelcultures (CBS) Fungal Biodiversity Centre, Netherlands) and contains deletions of the following genes: URA3, HIS3, PDC1, PDC5, PDC6, and GPD2. BP1064 was transformed with plasmids pYZ090 (SEQ ID NO: 1, described in U.S. Provisional Application Ser. No. 61/246,844) and pLH468 (SEQ ID NO: 2) to create strain NGC1-070 (BP1083, PNY1504).

[0180] Deletions, which completely removed the entire coding sequence, were created by homologous recombination with PCR fragments containing regions of homology upstream and downstream of the target gene and either a G418 resistance marker or URA3 gene for selection of transformants. The G418 resistance marker, flanked by loxP sites, was removed using Cre recombinase. The URA3 gene was removed by homologous recombination to create a scarless deletion or if flanked by loxP sites, was removed using Cre recombinase.

[0181] The scarless deletion procedure was adapted from Akada, et al., (Yeast 23:399-405, 2006). In general, the PCR cassette for each scarless deletion was made by combining four fragments, A-B-U-C, by overlapping PCR. The PCR cassette contained a selectable/counter-selectable marker, URA3 (Fragment U), consisting of the native CEN.PK 113-7D URA3 gene, along with the promoter (250 bp upstream of the URA3 gene) and terminator (150 bp downstream of the URA3 gene). Fragments A and C, each 500 bp long, corresponded to the 500 bp immediately upstream of the target gene (Fragment A) and the 3′ 500 bp of the target gene (Fragment C). Fragments A and C were used for integration of the cassette into the chromosome by homologous recombination. Fragment B (500 bp long) corresponded to the 500 bp immediately downstream of the target gene and was used for excision of the URA3 marker and Fragment C from the chromosome by homologous recombination, as a direct repeat of the sequence corresponding to Fragment B was created upon integration of the cassette into the chromosome. Using the PCR product ABUC cassette, the URA3 marker was first integrated into and then excised from the chromosome by homologous recombination. The initial integration deleted the gene, excluding the 3′ 500 bp. Upon excision, the 3′ 500 bp region of the gene was also deleted. For integration of genes using this method, the gene to be integrated was included in the PCR cassette between fragments A and B.

### URA3 Deletion

[0182] To delete the endogenous URA3 coding region, a ura3::loxP-kanMX-loxP cassette was PCR-amplified from pLA54 template DNA (SEQ ID NO: 3). pLA54 contains the K. lactis TEFI promoter and kanMX marker, and is flanked by loxP sites to allow recombination with Cre recombinase and removal of the marker. PCR was done using Phusion® DNA polymerase (New England BioLabs Inc., Ipswich, Mass.) and primers BK505 and BK506 (SEQ ID NOs: 4 and 5). The URA3 portion of each primer was derived from the 5′ region upstream of the URA3 promoter and 3′ region downstream of the coding region such that integration of the loxP-kanMX-loxP marker resulted in replacement of the URA3 coding region. The PCR product was transformed into CEN.PK 113-7D using standard genetic techniques (Methods in Yeast Genetics, 2005, Cold Spring Harbor Laboratory Press, Cold Spring Harbor, N.Y., pp. 201-202) and transformants were selected on YPD containing G418 (100 μg/mL) at 30° C. Transformants were screened to verify correct integration by PCR using primers LA468 and LA492 (SEQ ID NOs: 6 and 7) and designated CEN.PK 113-7ΔΔura3::kanMX.

### HIS3 Deletion

[0183] The four fragments for the PCR cassette for the scarless HIS3 deletion were amplified using Phusion® High Fidelity PCR Master Mix (New England BioLabs Inc., Ipswich, Mass.) and CEN.PK 113-7D genomic DNA as template, prepared with a Gentra® Puregene® Yeast/Bact, kit (Qiagen, Valencia, Calif.). HIS3 Fragment A was amplified with primer oBP452 (SEQ ID NO: 14) and primer oBP453 (SEQ ID NO: 15) containing a 5′ tail with homology to the 5′ end of HIS3 Fragment B. HIS3 Fragment B was amplified with primer oBP454 (SEQ ID NO: 16) containing a 5′ tail with homology to the 3′ end of HIS3 Fragment A, and primer oBP455 (SEQ ID NO: 17) containing a 5′ tail with homology to the 5′ end of HIS3 Fragment U. HIS3 Fragment U was amplified with primer oBP456 (SEQ ID NO: 18) containing a 5′ tail with homology to the 3′ end of HIS3 Fragment B, and primer oBP457 (SEQ ID NO: 19) containing a 5′ tail with homology to the 5′ end of HIS3 Fragment C. HIS3 Fragment C was amplified with primer oBP458 (SEQ ID NO: 20) containing a 5′ tail with homology to the 3′ end of HIS3 Fragment U, and primer oBP459 (SEQ ID NO: 21). PCR products were purified with a PCR Purification kit (Qiagen, Valencia, Calif.). HIS3 Fragment AB was created by overlapping PCR by mixing HIS3 Fragment A and HIS3 Fragment B and amplifying with primers oBP452 (SEQ ID NO: 14) and oBP455 (SEQ ID NO: 17). HIS3 Fragment UC was created by overlapping PCR by mixing HIS3 Fragment U and HIS3 Fragment C and amplifying with primers oBP456 (SEQ ID NO: 18) and oBP459 (SEQ ID NO: 21). The resulting PCR products were purified on an agarose gel followed by a Gel Extraction kit (Qiagen, Valencia, Calif.). The HIS3 ABUC cassette was created by overlapping PCR by mixing HIS3 Fragment AB and HIS3 Fragment UC and amplifying with primers oBP452 (SEQ ID NO: 14) and oBP459 (SEQ ID NO: 21). The PCR product was purified with a PCR Purification kit (Qiagen, Valencia, Calif.).

[0184] Competent cells of CEN.PK 113-7D Δura3::kanMX were made and transformed with the HIS3 ABUC PCR cassette using a Frozen-EZ Yeast Transformation II™ kit (Zymo Research Corporation, Irvine, Calif.). Transformation mixtures were plated on synthetic complete media lacking uracil supplemented with 2% glucose at 30° C. Transformants with a his3 knockout were screened for by PCR with primers oBP460 (SEQ ID NO: 22) and oBP461 (SEQ ID NO: 23) using genomic DNA prepared with a Gentra® Puregene® Yeast/Bact. kit (Qiagen, Valencia, Calif.). A correct transformant was selected as strain CEN.PK 113-7D Δura3::kanMX Δhis3::URA3.

[0185] KanMX Marker Removal from the Δura3 Site and URA3 μMarker Removal from the Δhis3 Site

[0186] The KanMX marker was removed by transforming CEN.PK 113-7D Δura3::kanMX Δhis3::URA3 with pRS423::PGAL1-cre (SEQ ID NO: 66, described in U.S. Provisional Application No. 61/290,639) using a Frozen-EZ Yeast Transformation II™ kit (Zymo Research Corporation, Irvine, Calif.) and plating on synthetic complete medium lacking histidine and uracil supplemented with 2% glucose at 30° C. Transformants were grown in YP supplemented with 1% galactose at 30° C. for ˜6 hours to induce the Cre recombinase and KanMX marker excision and plated onto YPD (2% glucose) plates at 30° C. for recovery. An isolate was grown overnight in YPD and plated on synthetic complete medium containing 5-fluoro-orotic acid (5-FOA, 0.1%) at 30° C. to select for isolates that lost the URA3 marker. 5-FOA resistant isolates were grown in and plated on YPD for removal of the pRS423::PGAL1-cre plasmid. Isolates were checked for loss of the KanMX marker, URA3 marker, and pRS423::PGAL1-cre plasmid by assaying growth on YPD+G418 plates, synthetic complete medium lacking uracil plates, and synthetic complete medium lacking histidine plates. A correct isolate that was sensitive to G418 and auxotrophic for uracil and histidine was selected as strain CEN.PK 113-7D Δura3::loxP Δhis3 and designated as BP857. The deletions and marker removal were confirmed by PCR and sequencing with primers oBP450 (SEQ ID NO: 24) and oBP451 (SEQ ID NO: 25) for Δura3 and primers oBP460 (SEQ ID NO: 22) and oBP461 (SEQ ID NO: 23) for Δhis3 using genomic DNA prepared with a Gentra® Puregene® Yeast/Bact. kit (Qiagen, Valencia, Calif.).

### PDC6 Deletion

[0187] The four fragments for the PCR cassette for the scarless PDC6 deletion were amplified using Phusion® High Fidelity PCR Master Mix (New England BioLabs Inc., Ipswich, Mass.) and CEN.PK 113-7D genomic DNA as template, prepared with a Gentra® Puregene® Yeast/Bact. kit (Qiagen, Valencia, Calif.). PDC6 Fragment A was amplified with primer oBP440 (SEQ ID NO: 26) and primer oBP441 (SEQ ID NO: 27) containing a 5′ tail with homology to the 5′ end of PDC6 Fragment B. PDC6 Fragment B was amplified with primer oBP442 (SEQ ID NO: 28), containing a 5′ tail with homology to the 3′ end of PDC6 Fragment A, and primer oBP443 (SEQ ID NO: 29) containing a 5′ tail with homology to the 5′ end of PDC6 Fragment U. PDC6 Fragment U was amplified with primer oBP444 (SEQ ID NO: 30) containing a 5′ tail with homology to the 3′ end of PDC6 Fragment B, and primer oBP445 (SEQ ID NO: 31) containing a 5′ tail with homology to the 5′ end of PDC6 Fragment C. PDC6 Fragment C was amplified with primer oBP446 (SEQ ID NO: 32) containing a 5′ tail with homology to the 3′ end of PDC6 Fragment U, and primer oBP447 (SEQ ID NO: 33). PCR products were purified with a PCR Purification kit (Qiagen, Valencia, Calif.). PDC6 Fragment AB was created by overlapping PCR by mixing PDC6 Fragment A and PDC6 Fragment B and amplifying with primers oBP440 (SEQ ID NO: 26) and oBP443 (SEQ ID NO: 29). PDC6 Fragment UC was created by overlapping PCR by mixing PDC6 Fragment U and PDC6 Fragment C and amplifying with primers oBP444 (SEQ ID NO: 30) and oBP447 (SEQ ID NO: 33). The resulting PCR products were purified on an agarose gel followed by a Gel Extraction kit (Qiagen, Valencia, Calif.). The PDC6 ABUC cassette was created by overlapping PCR by mixing PDC6 Fragment AB and PDC6 Fragment UC and amplifying with primers oBP440 (SEQ ID NO: 26) and oBP447 (SEQ ID NO: 33). The PCR product was purified with a PCR Purification kit (Qiagen, Valencia, Calif.).

[0188] Competent cells of CEN.PK 113-7D Δura3::loxP Δhis3 were made and transformed with the PDC6 ABUC PCR cassette using a Frozen-EZ Yeast Transformation II™ kit (Zymo Research Corporation, Irvine, Calif.). Transformation mixtures were plated on synthetic complete media lacking uracil supplemented with 2% glucose at 30° C. Transformants with a pdc6 knockout were screened for by PCR with primers oBP448 (SEQ ID NO: 34) and oBP449 (SEQ ID NO: 35) using genomic DNA prepared with a Gentra® Puregene® Yeast/Bact. kit (Qiagen, Valencia, Calif.). A correct transformant was selected as strain CEN.PK 113-7D Δura3::loxP Δhis3 Δpdc6::URA3.

[0189] CEN.PK 113-7D Δura3::loxP Δhis3 Δpdc6::URA3 was grown overnight in YPD and plated on synthetic complete medium containing 5-fluoro-orotic acid (0.1%) at 30° C. to select for isolates that lost the URA3 marker. The deletion and marker removal were confirmed by PCR and sequencing with primers oBP448 (SEQ ID NO: 34) and oBP449 (SEQ ID NO: 35) using genomic DNA prepared with a Gentra® Puregene® Yeast/Bact. kit (Qiagen, Valencia, Calif.). The absence of the PDC6 gene from the isolate was demonstrated by a negative PCR result using primers specific for the coding sequence of PDC6, oBP554 (SEQ ID NO: 36) and oBP555 (SEQ ID NO: 37). The correct isolate was selected as strain CEN.PK 113-7D Δura3::loxP Δhis3 Δpdc6 and designated as BP891.

PDC1 Deletion ilvDSm Integration

[0190] The PDC1 gene was deleted and replaced with the ilvD coding region from Streptococcus mutans ATCC No. 700610. The A fragment followed by the ilvD coding region from Streptococcus mutans for the PCR cassette for the PDC1 deletion-ilvDSm integration was amplified using Phusion® High Fidelity PCR Master Mix (New England BioLabs Inc., Ipswich, Mass.) and NYLA83 genomic DNA as template, prepared with a Gentra® Puregene® Yeast/Bact. kit (Qiagen, Valencia, Calif.). NYLA83 is a strain (construction described in U.S. Patent Application Publication No. 2011/0124060, incorporated herein by reference in its entirety) which carries the PDC1 deletion-ilvDSm integration described in U.S. Patent Application Publication No. 2009/0305363, herein incorporated by reference in its entirety). PDC1 Fragment A-ilvDSm (SEQ ID NO: 69) was amplified with primer oBP513 (SEQ ID NO: 38) and primer oBP515 (SEQ ID NO: 39) containing a 5′ tail with homology to the 5′ end of PDC1 Fragment B. The B, U, and C fragments for the PCR cassette for the PDC1 deletion-ilvDSm integration were amplified using Phusion® High Fidelity PCR Master Mix (New England BioLabs Inc., Ipswich, Mass.) and CEN.PK 113-7D genomic DNA as template, prepared with a Gentra® Puregene® Yeast/Bact. kit (Qiagen, Valencia, Calif.). PDC1 Fragment B was amplified with primer oBP516 (SEQ ID NO: 40) containing a 5′ tail with homology to the 3′ end of PDC1 Fragment A-ilvDSm, and primer oBP517 (SEQ ID NO: 41) containing a 5′ tail with homology to the 5′ end of PDC1 Fragment U. PDC1 Fragment U was amplified with primer oBP518 (SEQ ID NO: 42) containing a 5′ tail with homology to the 3′ end of PDC1 Fragment B, and primer oBP519 (SEQ ID NO: 43) containing a 5′ tail with homology to the 5′ end of PDC1 Fragment C. PDC1 Fragment C was amplified with primer oBP520 (SEQ ID NO: 44), containing a 5′ tail with homology to the 3′ end of PDC1 Fragment U, and primer oBP521 (SEQ ID NO: 45). PCR products were purified with a PCR Purification kit (Qiagen, Valencia, Calif. PDC1 Fragment A-ilvDSm-B was created by overlapping PCR by mixing PDC1 Fragment A-ilvDSm and PDC1 Fragment B and amplifying with primers oBP513 (SEQ ID NO: 38) and oBP517 (SEQ ID NO: 41). PDC1 Fragment UC was created by overlapping PCR by mixing PDC1 Fragment U and PDC1 Fragment C and amplifying with primers oBP518 (SEQ ID NO: 42) and oBP521 (SEQ ID NO: 45). The resulting PCR products were purified on an agarose gel followed by a Gel Extraction kit (Qiagen, Valencia, Calif.). The PDC1 A-ilvDSm-BUC cassette (SEQ ID NO: 70) was created by overlapping PCR by mixing PDC1 Fragment A-ilvDSm-B and PDC1 Fragment UC and amplifying with primers oBP513 (SEQ ID NO: 38) and oBP521 (SEQ ID NO: 45). The PCR product was purified with a PCR Purification kit (Qiagen, Valencia, Calif.).

[0191] Competent cells of CEN.PK 113-7D Δura3::loxP Δhis3 Δpdc6 were made and transformed with the PDC1 A-ilvDSm-BUC PCR cassette using a Frozen-EZ Yeast Transformation II™ kit (Zymo Research Corporation, Irvine, Calif.). Transformation mixtures were plated on synthetic complete media lacking uracil supplemented with 2% glucose at 30° C. Transformants with a pdc1 knockout ilvDSm integration were screened for by PCR with primers oBP511 (SEQ ID NO: 46) and oBP512 (SEQ ID NO: 47) using genomic DNA prepared with a Gentra® Puregene® Yeast/Bact. kit (Qiagen, Valencia, Calif.). The absence of the PDC1 gene from the isolate was demonstrated by a negative PCR result using primers specific for the coding sequence of PDC1, oBP550 (SEQ ID NO: 48) and oBP551 (SEQ ID NO: 49). A correct transformant was selected as strain CEN.PK 113-7D Δura3::loxP Δhis3 Δpdc6 Δpdc1::ilvDSm-URA3.

[0192] CEN.PK 113-7D Δura3::loxP Δhis3 Δpdc6 Δpdc1::ilvDSm-URA3 was grown overnight in YPD and plated on synthetic complete medium containing 5-fluoro-orotic acid (0.1%) at 30° C. to select for isolates that lost the URA3 marker. The deletion of PDC1, integration of ilvDSm, and marker removal were confirmed by PCR and sequencing with primers oBP511 (SEQ ID NO: 46) and oBP512 (SEQ ID NO: 47) using genomic DNA prepared with a Gentra® Puregene® Yeast/Bact. kit (Qiagen, Valencia, Calif.). The correct isolate was selected as strain CEN.PK 113-7D Δura3::loxP Δhis3 Δpdc6 Δpdc1::ilvDSm and designated as BP907.

PDC5 Deletion sadB Integration

[0193] The PDC5 gene was deleted and replaced with the sadB coding region from Achromobacter xylosoxidans. A segment of the PCR cassette for the PDC5 deletion-sadB integration was first cloned into plasmid pUC19-URA3MCS.

[0194] pUC19-URA3MCS is pUC19 based and contains the sequence of the URA3 gene from Saccharomyces cerevisiae situated within a multiple cloning site (MCS). pUC19 contains the pMB1 replicon and a gene coding for beta-lactamase for replication and selection in Escherichia coli. In addition to the coding sequence for URA3, the sequences from upstream and downstream of this gene were included for expression of the URA3 gene in yeast. The vector can be used for cloning purposes and can be used as a yeast integration vector.

[0195] The DNA encompassing the URA3 coding region along with 250 bp upstream and 150 bp downstream of the URA3 coding region from Saccharomyces cerevisiae CEN.PK 113-7D genomic DNA was amplified with primers oBP438 (SEQ ID NO: 12) containing BamHI, AscI, PmeI, and FseI restriction sites, and oBP439 (SEQ ID NO: 13) containing XbaI, PacI, and NotI restriction sites, using Phusion® High Fidelity PCR Master Mix (New England BioLabs Inc., Ipswich, Mass.). Genomic DNA was prepared using a Gentra® Puregene® Yeast/Bact. kit (Qiagen, Valencia, Calif.). The PCR product and pUC19 (SEQ ID NO: 72) were ligated with T4 DNA ligase after digestion with BamHI and XbaI to create vector pUC19-URA3MCS. The vector was confirmed by PCR and sequencing with primers oBP264 (SEQ ID NO: 10) and oBP265 (SEQ ID NO: 11).

[0196] The coding sequence of sadB and PDC5 Fragment B were cloned into pUC19-URA3MCS to create the sadB-BU portion of the PDC5 A-sadB-BUC PCR cassette. The coding sequence of sadB was amplified using pLH468-sadB (SEQ ID NO: 67) as template with primer oBP530 (SEQ ID NO: 50) containing an AscI restriction site, and primer oBP531 (SEQ ID NO: 51) containing a 5′ tail with homology to the 5′ end of PDC5 Fragment B. PDC5 Fragment B was amplified with primer oBP532 (SEQ ID NO: 52) containing a 5′ tail with homology to the 3′ end of sadB, and primer oBP533 (SEQ ID NO: 53) containing a PmeI restriction site. PCR products were purified with a PCR Purification kit, (Qiagen, Valencia, Calif.). sadB-PDC5 Fragment B was created by overlapping PCR by mixing the sadB and PDC5 Fragment B PCR products and amplifying with primers oBP530 (SEQ ID NO: 50) and oBP533 (SEQ ID NO: 53). The resulting PCR product was digested with AscI and PmeI and ligated with T4 DNA ligase into the corresponding sites of pUC19-URA3MCS after digestion with the appropriate enzymes. The resulting plasmid was used as a template for amplification of sadB-Fragment B-Fragment U using primers oBP536 (SEQ ID NO: 54) and oBP546 (SEQ ID NO: 55) containing a 5′ tail with homology to the 5′ end of PDC5 Fragment C. PDC5 Fragment C was amplified with primer oBP547 (SEQ ID NO: 56) containing a 5′ tail with homology to the 3′ end of PDC5 sadB-Fragment B-Fragment U, and primer oBP539 (SEQ ID NO: 57). PCR products were purified with a PCR Purification kit (Qiagen, Valencia, Calif.). PDC5 sadB-Fragment B-Fragment U-Fragment C was created by overlapping PCR by mixing PDC5 sadB-Fragment B-Fragment U and PDC5 Fragment C and amplifying with primers oBP536 (SEQ ID NO: 54) and oBP539 (SEQ ID NO: 57). The resulting PCR product was purified on an agarose gel followed by a Gel Extraction kit (Qiagen, Valencia, Calif.). The PDC5 A-sadB-BUC cassette (SEQ ID NO: 71) was created by amplifying PDC5 sadB-Fragment B-Fragment U-Fragment C with primers oBP542 (SEQ ID NO: 58) containing a 5′ tail with homology to the 50 nucleotides immediately upstream of the native PDC5 coding sequence, and oBP539 (SEQ ID NO: 57). The PCR product was purified with a PCR Purification kit (Qiagen, Valencia, Calif.).

[0197] Competent cells of CEN.PK 113-7D Δura3::loxP Δhis3 Δpdc6 Δpdc1::ilvDSm were made and transformed with the PDC5 A-sadB-BUC PCR cassette using a Frozen-EZ Yeast Transformation II™ kit (Zymo Research Corporation, Irvine, Calif.). Transformation mixtures were plated on synthetic complete media lacking uracil supplemented with 1% ethanol (no glucose) at 30° C. Transformants with a pdc5 knockout sadB integration were screened for by PCR with primers oBP540 (SEQ ID NO: 59) and oBP541 (SEQ ID NO: 60) using genomic DNA prepared with a Gentra® Puregene® Yeast/Bact. kit (Qiagen, Valencia, Calif.). The absence of the PDC5 gene from the isolate was demonstrated by a negative PCR result using primers specific for the coding sequence of PDC5, oBP552 (SEQ ID NO: 61) and oBP553 (SEQ ID NO: 62). A correct transformant was selected as strain CEN.PK 113-7D Δura3::loxP Δhis3 Δpdc6 Δpdc1::ilvDSm Δpdc5::sadB-URA3.

[0198] CEN.PK 113-7D Δura3::loxP Δhis3 Δpdc6 Δpdc1::ilvDSm Δpdc5::sadB-URA3 was grown overnight in YPE (1% ethanol) and plated on synthetic complete medium supplemented with ethanol (no glucose) and containing 5-fluoro-orotic acid (0.1%) at 30° C. to select for isolates that lost the URA3 marker. The deletion of PDC5, integration of sadB, and marker removal were confirmed by PCR with primers oBP540 (SEQ ID NO: 59) and oBP541 (SEQ ID NO: 60) using genomic DNA prepared with a Gentra® Puregene® Yeast/Bact. kit (Qiagen, Valencia, Calif.). The correct isolate was selected as strain CEN.PK 113-7D Δura3::loxP Δhis3 Δpdc6 Δpdc1::ilvDSm Δpdc5::sadB and designated as BP913.

### GPD2 Deletion

[0199] To delete the endogenous GPD2 coding region, a gpd2::loxP-URA3-loxP cassette (SEQ ID NO: 73) was PCR-amplified using loxP-URA3-loxP (SEQ ID NO: 68) as template DNA. loxP-URA3-loxP contains the URA3 marker from (ATCC No. 77107) flanked by loxP recombinase sites. PCR was done using Phusion® DNA polymerase (New England BioLabs Inc., Ipswich, Mass.) and primers LA512 and LA513 (SEQ ID NOs: 8 and 9). The GPD2 portion of each primer was derived from the 5′ region upstream of the GPD2 coding region and 3′ region downstream of the coding region such that integration of the loxP-URA3-loxP marker resulted in replacement of the GPD2 coding region. The PCR product was transformed into BP913 and transformants were selected on synthetic complete media lacking uracil supplemented with 1% ethanol (no glucose). Transformants were screened to verify correct integration by PCR using primers oBP582 and AA270 (SEQ ID NOs: 63 and 64).

[0200] The URA3 marker was recycled by transformation with pRS423::PGAL1-cre (SEQ ID NO: 66) and plating on synthetic complete media lacking histidine supplemented with 1% ethanol at 30° C. Transformants were streaked on synthetic complete medium supplemented with 1% ethanol and containing 5-fluoro-orotic acid (0.1%) and incubated at 30° C. to select for isolates that lost the URA3 marker. 5-FOA resistant isolates were grown in YPE (1% ethanol) for removal of the pRS423::PGAL1-cre plasmid. The deletion and marker removal were confirmed by PCR with primers oBP582 (SEQ ID NO: 63) and oBP591 (SEQ ID NO: 65). The correct isolate was selected as strain CEN.PK 113-7D Δura3::loxP Δhis3 Δpdc6 Δpdc1::ilvDSm Δpdc5::sadB Δgpd2::loxP and designated as PNY1503 (BP1064).

[0201] BP1064 was transformed with plasmids pYZ090 (SEQ ID NO: 1) and pLH468 (SEQ ID NO: 2) to create strain NGC1-070 (BP1083; PNY1504).

1. A method of producing butanol comprising:
(a) providing a composition comprising (i) a microorganism capable of producing butanol and (ii) an enzyme or combination of enzymes capable of converting a 5-carbon sugar to xylulose or xylulose-5-phosphate;
(b) contacting the composition with a carbon substrate comprising mixed sugars; and
(c) culturing the microorganism under conditions of limited oxygen utilization, whereby butanol is produced.

2. (canceled)

3. (canceled)

4. The method of claim 1, wherein the enzyme or combination of enzymes capable of converting a 5-carbon sugar to xylulose or xylulose-5-phosphate are recombinantly expressed by a microorganism in the composition.

5. The method of claim 4, wherein the enzyme or combination of enzymes capable of converting a 5-carbon sugar to xylulose or xylulose-5-phosphate are recombinantly expressed by the microorganism capable of producing butanol.

6. The method of claim 4, wherein the enzyme or combination of enzymes capable of converting a 5-carbon sugar to xylulose or xylulose-5-phosphate are not produced by the microorganism capable of producing butanol.

7. The method of claim 1, wherein the enzyme or combination of enzymes capable of converting a 5-carbon sugar to xylulose or xylulose-5-phosphate are not produced by a microorganism in the composition.

8. The method of claim 1, wherein the enzyme or combination of enzymes capable of converting a 5-carbon sugar to xylulose or xylulose-5-phosphate is selected from the group consisting of: (i) xylose isomerase; (ii) xylose reductase; (iii) xylitol dehydrogenase; (iv) arabinose isomerase; (v) ribulokinase; (vi) ribulose-phosphate-5-epimerase; (vii) arabinose reductase; (viii) arabitol dehydrogenase; (ix) xylulose reductase; (x) xylulokinase; (xi) aldose reductase; and (xii) combinations thereof.

9. (canceled)

10. (canceled)

11. (canceled)

12. (canceled)

13. (canceled)

14. (canceled)

15. (canceled)

16. (canceled)

17. The method of claim 1, wherein the source of 5-carbon sugars is a source of xylose.

18. The method of claim 1, wherein the source of 5-carbon sugars is a source of arabinose.

19. (canceled)

20. (canceled)

21. The method of claim 1, additionally comprising contacting the composition with a source of 6-carbon sugars.

22. The method of claim 21, wherein 5-carbon and 6-carbon sugars are cumulatively consumed at a rate of at least about 1.5 g/gdcw/h.

23. (canceled)

24. (canceled)

25. The method of claim 21, wherein 5-carbon sugars and 6-carbon sugars are consumed, and the rate of 5-carbon sugar consumption is at least about 1% the rate of 6-carbon sugar consumption.

26. The method of claim 1, wherein the source of 5-carbon sugars is lignocellulosic biomass.

27. (canceled)

28. The method of claim 26, wherein the lignocellulose biomass is pretreated with ammonia.

29. (canceled)

30. (canceled)

31. (canceled)

32. (canceled)

33. (canceled)

34. (canceled)

35. (canceled)

36. (canceled)

37. (canceled)

38. (canceled)

39. The method of claim 1, wherein an inhibitor of respiration is added to the composition.

40. (canceled)

41. The method of claim 1, wherein the composition and/or the source of 5-carbon sugars further comprises a microorganism that is not capable of producing butanol, and the microorganism capable of producing butanol is present at a concentration that is at least equal to 1 g/l.

42. (canceled)

43. The method of claim 1, wherein the specific butanol production is at least about 0.4 g/g/h.

44. (canceled)

45. The method of claim 1, further comprising purifying butanol from the culture.

46. (canceled)

47. A butanol composition obtained by the method of claim 1

48. (canceled)

49. A composition for producing butanol comprising:
(a) a microorganism capable of producing butanol;
(b) an enzyme or combination of enzymes capable of converting a 5-carbon sugar to xylulose or xylulose-5-phosphate;
(c) a source of 5-carbon sugars; and
(d) a fermentation media.

50. The composition of claim 49, wherein the butanol is isobutanol.

51. The composition of claim 49, wherein the microorganism is a yeast.

52. (canceled)

53. (canceled)

54. The composition of claim 49, wherein the source of 5-carbon sugars is present at a concentration of at least about 20 g/L.

55. (canceled)

56. (canceled)

57. The composition of claim 49, wherein the microorganism capable of producing butanol comprises polynucleotides encoding polypeptides that catalyze the conversion of: (a) pyruvate to acetolactate; (b) acetolactate to 2,3-dihydroxyisovalerate; (c) 2,3-dihydroxyisovalerate to 2-ketoisovalerate; (d) 2-ketoisovalerate to isobutyraldehyde; and (e) isobutyraldehyde to isobutanol.

58. (canceled)

59. (canceled)

60. (canceled)

61. The composition of claim 49, wherein the microorganism capable of producing butanol is Saccharomyces cerevisiae.

62. (canceled)

63. The composition of claim 49, further comprising a microorganism that does not produce butanol.

64. (canceled)

65. The composition of claim 49, wherein the composition is capable of producing butanol and ethanol.

66. The composition of claim 49, wherein the composition is capable of producing butanol at least about 0.4 g/g % theoretical yield.

67. (canceled)

68. (canceled)

69. (canceled)

70. (canceled)

71. (canceled)

72. (canceled)

73. (canceled)

74. (canceled)

75. (canceled)

76. (canceled)

The application's sequence listing, which the Patent Office published only in electronic form, follows.

SEQUENCE LISTING (399 sequences)

SEQ ID NO: 1 - DNA, 11856 bp, Artificial sequence
  Plasmid
tcccattaccgacatttgggcgctatacgtgcatatgttcatgtatgtatctgtatttaaaacacttttgtattatttttcctcatatatgtgtataggtttatacggatgatttaattattacttcaccaccctttatttcaggctgatatcttagccttgttactagttagaaaaagacatttttgctgtcagtcactgtcaagagattcttttgctggcatttcttctagaagcaaaaagagcgatgcgtcttttccgctgaaccgttccagcaaaaaagactaccaacgcaatatggattgtcagaatcatataaaagagaagcaaataactccttgtcttgtatcaattgcattataatatcttcttgttagtgcaatatcatatagaagtcatcgaaatagatattaagaaaaacaaactgtacaatcaatcaatcaatcatcgctgaggatgttgacaaaagcaacaaaagaacaaaaatcccttgtgaaaaacagaggggcggagcttgttgttgattgcttagtggagcaaggtgtcacacatgtatttggcattccaggtgcaaaaattgatgcggtatttgacgctttacaagataaaggacctgaaattatcgttgcccggcacgaacaaaacgcagcattcatggcccaagcagtcggccgtttaactggaaaaccgggagtcgtgttagtcacatcaggaccgggtgcctctaacttggcaacaggcctgctgacagcgaacactgaaggagaccctgtcgttgcgcttgctggaaacgtgatccgtgcagatcgtttaaaacggacacatcaatctttggataatgcggcgctattccagccgattacaaaatacagtgtagaagttcaagatgtaaaaaatataccggaagctgttacaaatgcatttaggatagcgtcagcagggcaggctggggccgcttttgtgagctttccgcaagatgttgtgaatgaagtcacaaatacgaaaaacgtgcgtgctgttgcagcgccaaaactcggtcctgcagcagatgatgcaatcagtgcggccatagcaaaaatccaaacagcaaaacttcctgtcgttttggtcggcatgaaaggcggaagaccggaagcaattaaagcggttcgcaagcttttgaaaaaggttcagcttccatttgttgaaacatatcaagctgccggtaccctttctagagatttagaggatcaatattttggccgtatcggtttgttccgcaaccagcctggcgatttactgctagagcaggcagatgttgttctgacgatcggctatgacccgattgaatatgatccgaaattctggaatatcaatggagaccggacaattatccatttagacgagattatcgctgacattgatcatgcttaccagcctgatcttgaattgatcggtgacattccgtccacgatcaatcatatcgaacacgatgctgtgaaagtggaatttgcagagcgtgagcagaaaatcctttctgatttaaaacaatatatgcatgaaggtgagcaggtgcctgcagattggaaatcagacagagcgcaccctcttgaaatcgttaaagagttgcgtaatgcagtcgatgatcatgttacagtaacttgcgatatcggttcgcacgccatttggatgtcacgttatttccgcagctacgagccgttaacattaatgatcagtaacggtatgcaaacactcggcgttgcgcttccttgggcaatcggcgcttcattggtgaaaccgggagaaaaagtggtttctgtctctggtgacggcggtttcttattctcagcaatggaattagagacagcagttcgactaaaagcaccaattgtacacattgtatggaacgacagcacatatgacatggttgcattccagcaattgaaaaaatataaccgtacatctgcggtcgatttcggaaatatcgatatcgtgaaatatgcggaaagcttcggagcaactggcttgcgcgtagaatcaccagaccagctggcagatgttctgcgtcaaggcatgaacgctgaaggtcctgtcatcatcgatgtcccggttgactacagtgataacattaatttagcaagtgacaagcttccgaaagaattcggggaactcatgaaaacgaaagctctctagttaattaatcatgtaattagttatgtcacgcttacattcacgccctccccccacatccgctctaaccgaaaaggaaggagttagacaacctgaagtctaggtccctatttatttttttatagttatgttagtattaagaacgttatttatatttcaaatttttcttttttttctgtacagacgcgtgtacgcatgtaacattatactgaaaaccttgcttgagaaggttttgggacgctcgaaggctttaatttgcgggcggccgcacctggtaaaacctctagtggagtagtagatgtaatcaatgaagcggaagccaaaagaccagagtagaggcctatagaagaaactgcgataccttttgtgatggctaaacaaacagacatctttttatatgtttttacttctgtatatcgtgaagtagtaagtgataagcgaatttggctaagaacgttgtaagtgaacaagggacctcttttgcctttcaaaaaaggattaaatggagttaatcattgagatttagttttcgttagattctgtatccctaaataactcccttacccgacgggaaggcacaaaagacttgaataatagcaaacggccagtagccaagaccaaataatactagagttaactgatggtcttaaacaggcattacgtggtgaactccaagaccaatatacaaaatatcgataagttattcttgcccaccaatttaaggagcctacatcaggacagtagtaccattcctcagagaagaggtatacataacaagaaaatcgcgtgaacaccttatataacttagcccgttattgagctaaaaaaccttgcaaaatttcctatgaataagaatacttcagacgtgataaaaatttactttctaactcttctcacgctgcccctatctgttcttccgctctaccgtgagaaataaagcatcgagtacggcagttcgctgtcactgaactaaaacaataaggctagttcgaatgatgaacttgcttgctgtcaaacttctgagttgccgctgatgtgacactgtgacaataaattcaaaccggttatagcggtctcctccggtaccggttctgccacctccaatagagctcagtaggagtcagaacctctgcggtggctgtcagtgactcatccgcgtttcgtaagttgtgcgcgtgcacatttcgcccgttcccgctcatcttgcagcaggcggaaattttcatcacgctgtaggacgcaaaaaaaaaataattaatcgtacaagaatcttggaaaaaaaattgaaaaattttgtataaaagggatgacctaacttgactcaatggcttttacacccagtattttccctttccttgtttgttacaattatagaagcaagacaaaaacatatagacaacctattcctaggagttatatttttttaccctaccagcaatataagtaaaaaactgtttaaacagtatggcagttacaatgtattatgaagatgatgtagaagtatcagcacttgctggaaagcaaattgcagtaatcggttatggttcacaaggacatgctcacgcacagaatttgcgtgattctggtcacaacgttatcattggtgtgcgccacggaaaatcttttgataaagcaaaagaagatggctttgaaacatttgaagtaggagaagcagtagctaaagctgatgttattatggttttggcaccagatgaacttcaacaatccatttatgaagaggacatcaaaccaaacttgaaagcaggttcagcacttggttttgctcacggatttaatatccattttggctatattaaagtaccagaagacgttgacgtctttatggttgcgcctaaggctccaggtcaccttgtccgtcggacttatactgaaggttttggtacaccagctttgtttgtttcacaccaaaatgcaagtggtcatgcgcgtgaaatcgcaatggattgggccaaaggaattggttgtgctcgagtgggaattattgaaacaacttttaaagaagaaacagaagaagatttgtttggagaacaagctgttctatgtggaggtttgacagcacttgttgaagccggttttgaaacactgacagaagctggatacgctggcgaattggcttactttgaagttttgcacgaaatgaaattgattgttgacctcatgtatgaaggtggttttactaaaatgcgtcaatccatctcaaatactgctgagtttggcgattatgtgactggtccacggattattactgacgaagttaaaaagaatatgaagcttgttttggctgatattcaatctggaaaatttgctcaagatttcgttgatgacttcaaagcggggcgtccaaaattaatagcctatcgcgaagctgcaaaaaatcttgaaattgaaaaaattggggcagagctacgtcaagcaatgccattcacacaatctggtgatgacgatgcctttaaaatctatcagtaaggccctgcaggccagaggaaaataatatcaagtgctggaaactttttctcttggaatttttgcaacatcaagtcatagtcaattgaattgacccaatttcacatttaagattttttttttttcatccgacatacatctgtacactaggaagccctgtttttctgaagcagcttcaaatatatatattttttacatatttattatgattcaatgaacaatctaattaaatcgaaaacaagaaccgaaacgcgaataaataatttatttagatggtgacaagtgtataagtcctcatcgggacagctacgatttctctttcggttttggctgagctactggttgctgtgacgcagcggcattagcgcggcgttatgagctaccctcgtggcctgaaagatggcgggaataaagcggaactaaaaattactgactgagccatattgaggtcaatttgtcaactcgtcaagtcacgtttggtggacggcccctttccaacgaatcgtatatactaacatgcgcgcgcttcctatatacacatatacatatatatatatatatatatgtgtgcgtgtatgtgtacacctgtatttaatttccttactcgcgggtttttcttttttctcaattcttggcttcctctttctcgagcggaccggatcctccgcggtgccggcagatctatttaaatggcgcgccgacgtcaggtggcacttttcggggaaatgtgcgcggaacccctatttgtttatttttctaaatacattcaaatatgtatccgctcatgagacaataaccctgataaatgcttcaataatattgaaaaaggaagagtatgagtattcaacatttccgtgtcgcccttattcccttttttgcggcattttgccttcctgtttttgctcacccagaaacgctggtgaaagtaaaagatgctgaagatcagttgggtgcacgagtgggttacatcgaactggatctcaacagcggtaagatccttgagagttttcgccccgaagaacgttttccaatgatgagcacttttaaagttctgctatgtggcgcggtattatcccgtattgacgccgggcaagagcaactcggtcgccgcatacactattctcagaatgacttggttgagtactcaccagtcacagaaaagcatcttacggatggcatgacagtaagagaattatgcagtgctgccataaccatgagtgataacactgcggccaacttacttctgacaacgatcggaggaccgaaggagctaaccgcttttttgcacaacatgggggatcatgtaactcgccttgatcgttgggaaccggagctgaatgaagccataccaaacgacgagcgtgacaccacgatgcctgtagcaatggcaacaacgttgcgcaaactattaactggcgaactacttactctagcttcccggcaacaattaatagactggatggaggcggataaagttgcaggaccacttctgcgctcggcccttccggctggctggtttattgctgataaatctggagccggtgagcgtgggtctcgcggtatcattgcagcactggggccagatggtaagccctcccgtatcgtagttatctacacgacggggagtcaggcaactatggatgaacgaaatagacagatcgctgagataggtgcctcactgattaagcattggtaactgtcagaccaagtttactcatatatactttagattgatttaaaacttcatttttaatttaaaaggatctaggtgaagatcctttttgataatctcatgaccaaaatcccttaacgtgagttttcgttccactgagcgtcagaccccgtagaaaagatcaaaggatcttcttgagatcctttttttctgcgcgtaatctgctgcttgcaaacaaaaaaaccaccgctaccagcggtggtttgtttgccggatcaagagctaccaactctttttccgaaggtaactggcttcagcagagcgcagataccaaatactgttcttctagtgtagccgtagttaggccaccacttcaagaactctgtagcaccgcctacatacctcgctctgctaatcctgttaccagtggctgctgccagtggcgataagtcgtgtcttaccgggttggactcaagacgatagttaccggataaggcgcagcggtcgggctgaacggggggttcgtgcacacagcccagcttggagcgaacgacctacaccgaactgagatacctacagcgtgagctatgagaaagcgccacgcttcccgaagggagaaaggcggacaggtatccggtaagcggcagggtcggaacaggagagcgcacgagggagcttccagggggaaacgcctggtatctttatagtcctgtcgggtttcgccacctctgacttgagcgtcgatttttgtgatgctcgtcaggggggcggagcctatggaaaaacgccagcaacgcggcctttttacggttcctggccttttgctggccttttgctcacatgttctttcctgcgttatcccctgattctgtggataaccgtattaccgcctttgagtgagctgataccgctcgccgcagccgaacgaccgagcgcagcgagtcagtgagcgaggaagcggaagagcgcccaatacgcaaaccgcctctccccgcgcgttggccgattcattaatgcagctggcacgacaggtttcccgactggaaagcgggcagtgagcgcaacgcaattaatgtgagttagctcactcattaggcaccccaggctttacactttatgcttccggctcgtatgttgtgtggaattgtgagcggataacaatttcacacaggaaacagctatgaccatgattacgccaagctttttctttccaattttttttttttcgtcattataaaaatcattacgaccgagattcccgggtaataactgatataattaaattgaagctctaatttgtgagtttagtatacatgcatttacttataatacagttttttagttttgctggccgcatcttctcaaatatgcttcccagcctgcttttctgtaacgttcaccctctaccttagcatcccttccctttgcaaatagtcctcttccaacaataataatgtcagatcctgtagagaccacatcatccacggttctatactgttgacccaatgcgtctcccttgtcatctaaacccacaccgggtgtcataatcaaccaatcgtaaccttcatctcttccacccatgtctctttgagcaataaagccgataacaaaatctttgtcgctcttcgcaatgtcaacagtacccttagtatattctccagtagatagggagcccttgcatgacaattctgctaacatcaaaaggcctctaggttcctttgttacttcttctgccgcctgcttcaaaccgctaacaatacctgggcccaccacaccgtgtgcattcgtaatgtctgcccattctgctattctgtatacacccgcagagtactgcaatttgactgtattaccaatgtcagcaaattttctgtcttcgaagagtaaaaaattgtacttggcggataatgcctttagcggcttaactgtgccctccatggaaaaatcagtcaagatatccacatgtgtttttagtaaacaaattttgggacctaatgcttcaactaactccagtaattccttggtggtacgaacatccaatgaagcacacaagtttgtttgcttttcgtgcatgatattaaatagcttggcagcaacaggactaggatgagtagcagcacgttccttatatgtagctttcgacatgatttatcttcgtttcctgcaggtttttgttctgtgcagttgggttaagaatactgggcaatttcatgtttcttcaacactacatatgcgtatatataccaatctaagtctgtgctccttccttcgttcttccttctgttcggagattaccgaatcaaaaaaatttcaaggaaaccgaaatcaaaaaaaagaataaaaaaaaaatgatgaattgaaaagcttgcatgcctgcaggtcgactctagtatactccgtctactgtacgatacacttccgctcaggtccttgtcctttaacgaggccttaccactcttttgttactctattgatccagctcagcaaaggcagtgtgatctaagattctatcttcgcgatgtagtaaaactagctagaccgagaaagagactagaaatgcaaaaggcacttctacaatggctgccatcattattatccgatgtgacgctgcattttttttttttttttttttttttttttttttttttttttttttttttttttgtacaaatatcataaaaaaagagaatctttttaagcaaggattttcttaacttcttcggcgacagcatcaccgacttcggtggtactgttggaaccacctaaatcaccagttctgatacctgcatccaaaacctttttaactgcatcttcaatggctttaccttcttcaggcaagttcaatgacaatttcaacatcattgcagcagacaagatagtggcgatagggttgaccttattctttggcaaatctggagcggaaccatggcatggttcgtacaaaccaaatgcggtgttcttgtctggcaaagaggccaaggacgcagatggcaacaaacccaaggagcctgggataacggaggcttcatcggagatgatatcaccaaacatgttgctggtgattataataccatttaggtgggttgggttcttaactaggatcatggcggcagaatcaatcaattgatgttgaactttcaatgtagggaattcgttcttgatggtttcctccacagtttttctccataatcttgaagaggccaaaacattagctttatccaaggaccaaataggcaatggtggctcatgttgtagggccatgaaagcggccattcttgtgattctttgcacttctggaacggtgtattgttcactatcccaagcgacaccatcaccatcgtcttcctttctcttaccaaagtaaatacctcccactaattctctaacaacaacgaagtcagtacctttagcaaattgtggcttgattggagataagtctaaaagagagtcggatgcaaagttacatggtcttaagttggcgtacaattgaagttctttacggatttttagtaaaccttgttcaggtctaacactaccggtaccccatttaggaccacccacagcacctaacaaaacggcatcagccttcttggaggcttccagcgcctcatctggaagtggaacacctgtagcatcgatagcagcaccaccaattaaatgattttcgaaatcgaacttgacattggaacgaacatcagaaatagctttaagaaccttaatggcttcggctgtgatttcttgaccaacgtggtcacctggcaaaacgacgatcttcttaggggcagacattacaatggtatatccttgaaatatatataaaaaaaaaaaaaaaaaaaaaaaaaaaaaatgcagcttctcaatgatattcgaatacgctttgaggagatacagcctaatatccgacaaactgttttacagatttacgatcgtacttgttacccatcattgaattttgaacatccgaacctgggagttttccctgaaacagatagtatatttgaacctgtataataatatatagtctagcgctttacggaagacaatgtatgtatttcggttcctggagaaactattgcatctattgcataggtaatcttgcacgtcgcatccccggttcattttctgcgtttccatcttgcacttcaatagcatatctttgttaacgaagcatctgtgcttcattttgtagaacaaaaatgcaacgcgagagcgctaatttttcaaacaaagaatctgagctgcatttttacagaacagaaatgcaacgcgaaagcgctattttaccaacgaagaatctgtgcttcatttttgtaaaacaaaaatgcaacgcgagagcgctaatttttcaaacaaagaatctgagctgcatttttacagaacagaaatgcaacgcgagagcgctattttaccaacaaagaatctatacttcttttttgttctacaaaaatgcatcccgagagcgctatttttctaacaaagcatcttagattactttttttctcctttgtgcgctctataatgcagtctcttgataactttttgcactgtaggtccgttaaggttagaagaaggctactttggtgtctattttctcttccataaaaaaagcctgactccacttcccgcgtttactgattactagcgaagctgcgggtgcattttttcaagataaaggcatccccgattatattctataccgatgtggattgcgcatactttgtgaacagaaagtgatagcgttgatgattcttcattggtcagaaaattatgaacggtttcttctattttgtctctatatactacgtataggaaatgtttacattttcgtattgttttcgattcactctatgaatagttcttactacaatttttttgtctaaagagtaatactagagataaacataaaaaatgtagaggtcgagtttagatgcaagttcaaggagcgaaaggtggatgggtaggttatatagggatatagcacagagatatatagcaaagagatacttttgagcaatgtttgtggaagcggtattcgcaatattttagtagctcgttacagtccggtgcgtttttggttttttgaaagtgcgtcttcagagcgcttttggttttcaaaagcgctctgaagttcctatactttctagagaataggaacttcggaataggaacttcaaagcgtttccgaaaacgagcgcttccgaaaatgcaacgcgagctgcgcacatacagctcactgttcacgtcgcacctatatctgcgtgttgcctgtatatatatatacatgagaagaacggcatagtgcgtgtttatgcttaaatgcgtacttatatgcgtctatttatgtaggatgaaaggtagtctagtacctcctgtgatattatcccattccatgcggggtatcgtatgcttccttcagcactaccctttagctgttctatatgctgccactcctcaattggattagtctcatccttcaatgctatcatttcctttgatattggatcatatgcatagtaccgagaaactagaggatc

SEQ ID NO: 2 - DNA, 15539 bp, Artificial sequence
  Plasmid
tcgcgcgtttcggtgatgacggtgaaaacctctgacacatgcagctcccggagacggtcacagcttgtctgtaagcggatgccgggagcagacaagcccgtcagggcgcgtcagcgggtgttggcgggtgtcggggctggcttaactatgcggcatcagagcagattgtactgagagtgcaccataaattcccgttttaagagcttggtgagcgctaggagtcactgccaggtatcgtttgaacacggcattagtcagggaagtcataacacagtcctttcccgcaattttctttttctattactcttggcctcctctagtacactctatatttttttatgcctcggtaatgattttcatttttttttttccacctagcggatgactctttttttttcttagcgattggcattatcacataatgaattatacattatataaagtaatgtgatttcttcgaagaatatactaaaaaatgagcaggcaagataaacgaaggcaaagatgacagagcagaaagccctagtaaagcgtattacaaatgaaaccaagattcagattgcgatctctttaaagggtggtcccctagcgatagagcactcgatcttcccagaaaaagaggcagaagcagtagcagaacaggccacacaatcgcaagtgattaacgtccacacaggtatagggtttctggaccatatgatacatgctctggccaagcattccggctggtcgctaatcgttgagtgcattggtgacttacacatagacgaccatcacaccactgaagactgcgggattgctctcggtcaagcttttaaagaggccctaggggccgtgcgtggagtaaaaaggtttggatcaggatttgcgcctttggatgaggcactttccagagcggtggtagatctttcgaacaggccgtacgcagttgtcgaacttggtttgcaaagggagaaagtaggagatctctcttgcgagatgatcccgcattttcttgaaagctttgcagaggctagcagaattaccctccacgttgattgtctgcgaggcaagaatgatcatcaccgtagtgagagtgcgttcaaggctcttgcggttgccataagagaagccacctcgcccaatggtaccaacgatgttccctccaccaaaggtgttcttatgtagtgacaccgattatttaaagctgcagcatacgatatatatacatgtgtatatatgtatacctatgaatgtcagtaagtatgtatacgaacagtatgatactgaagatgacaaggtaatgcatcattctatacgtgtcattctgaacgaggcgcgctttccttttttctttttgctttttctttttttttctcttgaactcgacggatctatgcggtgtgaaataccgcacagatgcgtaaggagaaaataccgcatcaggaaattgtaagcgttaatattttgttaaaattcgcgttaaatttttgttaaatcagctcattttttaaccaataggccgaaatcggcaaaatcccttataaatcaaaagaatagaccgagatagggttgagtgttgttccagtttggaacaagagtccactattaaagaacgtggactccaacgtcaaagggcgaaaaaccgtctatcagggcgatggcccactacgtgaaccatcaccctaatcaagttttttggggtcgaggtgccgtaaagcactaaatcggaaccctaaagggagcccccgatttagagcttgacggggaaagccggcgaacgtggcgagaaaggaagggaagaaagcgaaaggagcgggcgctagggcgctggcaagtgtagcggtcacgctgcgcgtaaccaccacacccgccgcgcttaatgcgccgctacagggcgcgtccattcgccattcaggctgcgcaactgttgggaagggcgcggtgcgggcctcttcgctattacgccagctggcgaaagggggatgtgctgcaaggcgattaagttgggtaacgccagggttttcccagtcacgacgttgtaaaacgacggccagtgagcgcgcgtaatacgactcactatagggcgaattgggtaccgggccccccctcgaggtcgacggcgcgccactggtagagagcgactttgtatgccccaattgcgaaacccgcgatatccttctcgattctttagtacccgaccaggacaaggaaaaggaggtcgaaacgtttttgaagaaacaagaggaactacacggaagctctaaagatggcaaccagccagaaactaagaaaatgaagttgatggatccaactggcaccgctggcttgaacaacaataccagccttccaacttctgtaaataacggcggtacgccagtgccaccagtaccgttacctttcggtatacctcctttccccatgtttccaatgcccttcatgcctccaacggctactatcacaaatcctcatcaagctgacgcaagccctaagaaatgaataacaatactgacagtactaaataattgcctacttggcttcacatacgttgcatacgtcgatatagataataatgataatgacagcaggattatcgtaatacgtaatagctgaaaatctcaaaaatgtgtgggtcattacgtaaataatgataggaatgggattcttctatttttcctttttccattctagcagccgtcgggaaaacgtggcatcctctctttcgggctcaattggagtcacgctgccgtgagcatcctctctttccatatctaacaactgagcacgtaaccaatggaaaagcatgagcttagcgttgctccaaaaaagtattggatggttaataccatttgtctgttctcttctgactttgactcctcaaaaaaaaaaatctacaatcaacagatcgcttcaattacgccctcacaaaaacttttttccttcttcttcgcccacgttaaattttatccctcatgttgtctaacggatttctgcacttgatttattataaaaagacaaagacataatacttctctatcaatttcagttattgttcttccttgcgttattcttctgttcttctttttcttttgtcatatataaccataaccaagtaatacatattcaaactagtatgactgacaaaaaaactcttaaagacttaagaaatcgtagttctgtttacgattcaatggttaaatcacctaatcgtgctatgttgcgtgcaactggtatgcaagatgaagactttgaaaaacctatcgtcggtgtcatttcaacttgggctgaaaacacaccttgtaatatccacttacatgactttggtaaactagccaaagtcggtgttaaggaagctggtgcttggccagttcagttcggaacaatcacggtttctgatggaatcgccatgggaacccaaggaatgcgtttctccttgacatctcgtgatattattgcagattctattgaagcagccatgggaggtcataatgcggatgcttttgtagccattggcggttgtgataaaaacatgcccggttctgttatcgctatggctaacatggatatcccagccatttttgcttacggcggaacaattgcacctggtaatttagacggcaaagatatcgatttagtctctgtctttgaaggtgtcggccattggaaccacggcgatatgaccaaagaagaagttaaagctttggaatgtaatgcttgtcccggtcctggaggctgcggtggtatgtatactgctaacacaatggcgacagctattgaagttttgggacttagccttccgggttcatcttctcacccggctgaatccgcagaaaagaaagcagatattgaagaagctggtcgcgctgttgtcaaaatgctcgaaatgggcttaaaaccttctgacattttaacgcgtgaagcttttgaagatgctattactgtaactatggctctgggaggttcaaccaactcaacccttcacctcttagctattgcccatgctgctaatgtggaattgacacttgatgatttcaatactttccaagaaaaagttcctcatttggctgatttgaaaccttctggtcaatatgtattccaagacctttacaaggtcggaggggtaccagcagttatgaaatatctccttaaaaatggcttccttcatggtgaccgtatcacttgtactggcaaaacagtcgctgaaaatttgaaggcttttgatgatttaacacctggtcaaaaggttattatgccgcttgaaaatcctaaacgtgaagatggtccgctcattattctccatggtaacttggctccagacggtgccgttgccaaagtttctggtgtaaaagtgcgtcgtcatgtcggtcctgctaaggtctttaattctgaagaagaagccattgaagctgtcttgaatgatgatattgttgatggtgatgttgttgtcgtacgttttgtaggaccaaagggcggtcctggtatgcctgaaatgctttccctttcatcaatgattgttggtaaagggcaaggtgaaaaagttgcccttctgacagatggccgcttctcaggtggtacttatggtcttgtcgtgggtcatatcgctcctgaagcacaagatggcggtccaatcgcctacctgcaaacaggagacatagtcactattgaccaagacactaaggaattacactttgatatctccgatgaagagttaaaacatcgtcaagagaccattgaattgccaccgctctattcacgcggtatccttggtaaatatgctcacatcgtttcgtctgcttctaggggagccgtaacagacttttggaagcctgaagaaactggcaaaaaatgttgtcctggttgctgtggttaagcggccgcgttaattcaaattaattgatatagttttttaatgagtattgaatctgtttagaaataatggaatattatttttatttatttatttatattattggtcggctcttttcttctgaaggtcaatgacaaaatgatatgaaggaaataatgatttctaaaattttacaacgtaagatatttttacaaaagcctagctcatcttttgtcatgcactattttactcacgcttgaaattaacggccagtccactgcggagtcatttcaaagtcatcctaatcgatctatcgtttttgatagctcattttggagttcgcgattgtcttctgttattcacaactgttttaatttttatttcattctggaactcttcgagttctttgtaaagtctttcatagtagcttactttatcctccaacatatttaacttcatgtcaatttcggctcttaaattttccacatcatcaagttcaacatcatcttttaacttgaatttattctctagctcttccaaccaagcctcattgctccttgatttactggtgaaaagtgatacactttgcgcgcaatccaggtcaaaactttcctgcaaagaattcaccaatttctcgacatcatagtacaatttgttttgttctcccatcacaatttaatatacctgatggattcttatgaagcgctgggtaatggacgtgtcactctacttcgcctttttccctactccttttagtacggaagacaatgctaataaataagagggtaataataatattattaatcggcaaaaaagattaaacgccaagcgtttaattatcagaaagcaaacgtcgtaccaatccttgaatgcttcccaattgtatattaagagtcatcacagcaacatattcttgttattaaattaattattattgatttttgatattgtataaaaaaaccaaatatgtataaaaaaagtgaataaaaaataccaagtatggagaaatatattagaagtctatacgttaaaccacccgggccccccctcgaggtcgacggtatcgataagcttgatatcgaattcctgcagcccgggggatccactagttctagagcggccgctctagaactagtaccacaggtgttgtcctctgaggacataaaatacacaccgagattcatcaactcattgctggagttagcatatctacaattgggtgaaatggggagcgatttgcaggcatttgctcggcatgccggtagaggtgtggtcaataagagcgacctcatgctatacctgagaaagcaacctgacctacaggaaagagttactcaagaataagaattttcgttttaaaacctaagagtcactttaaaatttgtatacacttattttttttataacttatttaataataaaaatcataaatcataagaaattcgcttactcttaattaatcaaaaagttaaaattgtacgaatagattcaccacttcttaacaaatcaaacccttcattgattttctcgaatggcaatacatgtgtaattaaaggatcaagagcaaacttcttcgccataaagtcggcaacaagttttggaacactatccttgctcttaaaaccgccaaatatagctcccttccatgtacgaccgcttagcaacagcataggattcatcgacaaattttgtgaatcaggaggaacacctacgatcacactgactccatatgcctcttgacagcaggacaacgcagttaccatagtatcaagacggcctataacttcaaaagagaaatcaactccaccgtttgacatttcagtaaggacttcttgtattggtttcttataatcttgagggttaacacattcagtagccccgacctccttagcttttgcaaatttgtccttattgatgtctacacctataatcctcgctgcgcctgcagctttacaccccataataacgcttagtcctactcctcctaaaccgaatactgcacaagtcgaaccctgtgtaacctttgcaactttaactgcggaaccgtaaccggtggaaaatccgcaccctatcaagcaaactttttccagtggtgaagctgcatcgattttagcgacagatatctcgtccaccactgtgtattgggaaaatgtagaagtaccaaggaaatggtgtataggtttccctctgcatgtaaatctgcttgtaccatcctgcatagtacctctaggcatagacaaatcatttttaaggcagaaattaccctcaggatgtttgcagactctacacttaccacattgaggagtgaacagtgggatcactttatcaccaggacgaacagtggtaacaccttcacctatggattcaacgattccggcagcctcgtgtcccgcgattactggcaaaggagtaactagagtgccactcaccacatggtcgtcggatctacagattccggtggcaaccatcttgattctaacctcgtgtgcttttggtggcgctacttctacttcttctatgctaaacggctttttctcttcccacaaaactgccgctttacacttaataactttaccggctgttgacatcctcagctagctattgtaatatgtgtgtttgtttggattattaagaagaataattacaaaaaaaattacaaaggaaggtaattacaacagaattaagaaaggacaagaaggaggaagagaatcagttcattatttcttctttgttatataacaaacccaagtagcgatttggccatacattaaaagttgagaaccaccctccctggcaacagccacaactcgttaccattgttcatcacgatcatgaaactcgctgtcagctgaaatttcacctcagtggatctctctttttattcttcatcgttccactaacctttttccatcagctggcagggaacggaaagtggaatcccatttagcgagcttcctcttttcttcaagaaaagacgaagcttgtgtgtgggtgcgcgcgctagtatctttccacattaagaaatataccataaaggttacttagacatcactatggctatatatatatatatatatatatgtaacttagcaccatcgcgcgtgcatcactgcatgtgttaaccgaaaagtttggcgaacacttcaccgacacggtcatttagatctgtcgtctgcattgcacgtcccttagccttaaatcctaggcgggagcattctcgtgtaattgtgcagcctgcgtagcaactcaacatagcgtagtctacccagtttttcaagggtttatcgttagaagattctcccttttcttcctgctcacaaatcttaaagtcatacattgcacgactaaatgcaagcatgcggatcccccgggctgcaggaattcgatatcaagcttatcgataccgtcgactggccattaatctttcccatattagatttcgccaagccatgaaagttcaagaaaggtctttagacgaattacccttcatttctcaaactggcgtcaagggatcctggtatggttttatcgttttatttctggttcttatagcatcgttttggacttctctgttcccattaggcggttcaggagccagcgcagaatcattctttgaaggatacttatcctttccaattttgattgtctgttacgttggacataaactgtatactagaaattggactttgatggtgaaactagaagatatggatcttgataccggcagaaaacaagtagatttgactcttcgtagggaagaaatgaggattgagcgagaaacattagcaaaaagatccttcgtaacaagatttttacatttctggtgttgaagggaaagatatgagctatacagcggaatttccatatcactcagattttgttatctaattttttccttcccacgtccgcgggaatctgtgtatattactgcatctagatatatgttatcttatcttggcgcgtacatttaattttcaacgtattctataagaaattgcgggagtttttttcatgtagatgatactgactgcacgcaaatataggcatgatttataggcatgatttgatggctgtaccgataggaacgctaagagtaacttcagaatcgttatcctggcggaaaaaattcatttgtaaactttaaaaaaaaaagccaatatccccaaaattattaagagcgcctccattattaactaaaatttcactcagcatccacaatgtatcaggtatctactacagatattacatgtggcgaaaaagacaagaacaatgcaatagcgcatcaagaaaaaacacaaagctttcaatcaatgaatcgaaaatgtcattaaaatagtatataaattgaaactaagtcataaagctataaaaagaaaatttatttaaatgcaagatttaaagtaaattcacggccctgcaggcctcagctcttgttttgttctgcaaataacttacccatctttttcaaaactttaggtgcaccctcctttgctagaataagttctatccaatacatcctatttggatctgcttgagcttctttcatcacggatacgaattcattttctgttctcacaattttggacacaactctgtcttccgttgccccgaaactttctggcagttttgagtaattccacataggaatgtcattataactctggttcggaccatgaatttccctctcaaccgtgtaaccatcgttattaatgataaagcagattgggtttatcttctctctaatggctagtcctaattcttggacagtcagttgcaatgatccatctccgataaacaataaatgtctagattctttatctgcaatttggctgcctagagctgcggggaaagtgtatcctatagatccccacaagggttgaccaataaaatgtgatttcgatttcagaaatatagatgaggcaccgaagaaagaagtgccttgttcagccacgatcgtctcattactttgggtcaaattttcgacagcttgccacagtctatcttgtgacaacagcgcgttagaaggtacaaaatcttcttgctttttatctatgtacttgcctttatattcaatttcggacaagtcaagaagagatgatatcagggattcgaagtcgaaattttggattctttcgttgaaaattttaccttcatcgatattcaaggaaatcattttattttcattaagatggtgagtaaatgcacccgtactagaatcggtaagctttacacccaacataagaataaaatcagcagattccacaaattccttcaagtttggctctgacagagtaccgttgtaaatccccaaaaatgagggcaatgcttcatcaacagatgatttaccaaagttcaaagtagtaataggtaacttagtctttgaaataaactgagtaacagtcttctctaggccgaacgatataatttcatggcctgtgattacaattggtttcttggcattcttcagactttcctgtattttgttcagaatctcttgatcagatgtattcgacgtggaattttccttcttaagaggcaaggatggtttttcagccttagcggcagctacatctacaggtaaattgatgtaaaccggctttctttcctttagtaaggcagacaacactctatcaatttcaacagttgcattctcggctgtcaataaagtcctggcagcagtaaccggttcgtgcatcttcataaagtgcttgaaatcaccatcagccaacgtatggtgaacaaacttaccttcgttctgcactttcgaggtaggagatcccacgatctcaacaacaggcaggttctcagcataggagcccgctaagccattaactgcggataattcgccaacaccaaatgtagtcaagaatgccgcagcctttttcgttcttgcgtacccgtcggccatataggaggcatttaactcattagcatttcccacccatttcatatctttgtgtgaaataatttgatctagaaattgcaaattgtagtcacctggtactccgaatatttcttctatacctaattcgtgtaatctgtccaacagatagtcacctactgtatacattttgtttactagtttatgtgtgtttattcgaaactaagttcttggtgttttaaaactaaaaaaaagactaactataaaagtagaatttaagaagtttaagaaatagatttacagaattacaatcaatacctaccgtctttatatacttattagtcaagtaggggaataatttcagggaactggtttcaaccttttttttcagctttttccaaatcagagagagcagaaggtaatagaaggtgtaagaaaatgagatagatacatgcgtgggtcaattgccttgtgtcatcatttactccaggcaggttgcatcactccattgaggttgtgcccgttttttgcctgtttgtgcccctgttctctgtagttgcgctaagagaatggacctatgaactgatggttggtgaagaaaacaatattttggtgctgggattctttttttttctggatgccagcttaaaaagcgggctccattatatttagtggatgccaggaataaactgttcacccagacacctacgatgttatatattctgtgtaacccgccccctattttgggcatgtacgggttacagcagaattaaaaggctaattttttgactaaataaagttaggaaaatcactactattaattatttacgtattctttgaaatggcagtattgataatgataaactcgaactgaaaaagcgtgttttttattcaaaatgattctaactcccttacgtaatcaaggaatctttttgccttggcctccgcgtcattaaacttcttgttgttgacgctaacattcaacgctagtatatattcgtttttttcaggtaagttcttttcaacgggtcttactgatgaggcagtcgcgtctgaacctgttaagaggtcaaatatgtcttcttgaccgtacgtgtcttgcatgttattagctttgggaatttgcatcaagtcataggaaaatttaaatcttggctctcttgggctcaaggtgacaaggtcctcgaaaatagggcgcgccccaccgcggtggagctccagcttttgttccctttagtgagggttaattgcgcgcttggcgtaatcatggtcatagctgtttcctgtgtgaaattgttatccgctcacaattccacacaacatacgagccggaagcataaagtgtaaagcctggggtgcctaatgagtgagctaactcacattaattgcgttgcgctcactgcccgctttccagtcgggaaacctgtcgtgccagctgcattaatgaatcggccaacgcgcggggagaggcggtttgcgtattgggcgctcttccgcttcctcgctcactgactcgctgcgctcggtcgttcggctgcggcgagcggtatcagctcactcaaaggcggtaatacggttatccacagaatcaggggataacgcaggaaagaacatgtgagcaaaaggccagcaaaaggccaggaaccgtaaaaaggccgcgttgctggcgtttttccataggctccgcccccctgacgagcatcacaaaaatcgacgctcaagtcagaggtggcgaaacccgacaggactataaagataccaggcgtttccccctggaagctccctcgtgcgctctcctgttccgaccctgccgcttaccggatacctgtccgcctttctcccttcgggaagcgtggcgctttctcatagctcacgctgtaggtatctcagttcggtgtaggtcgttcgctccaagctgggctgtgtgcacgaaccccccgttcagcccgaccgctgcgccttatccggtaactatcgtcttgagtccaacccggtaagacacgacttatcgccactggcagcagccactggtaacaggattagcagagcgaggtatgtaggcggtgctacagagttcttgaagtggtggcctaactacggctacactagaagaacagtatttggtatctgcgctctgctgaagccagttaccttcggaaaaagagttggtagctcttgatccggcaaacaaaccaccgctggtagcggtggtttttttgtttgcaagcagcagattacgcgcagaaaaaaaggatctcaagaagatcctttgatcttttctacggggtctgacgctcagtggaacgaaaactcacgttaagggattttggtcatgagattatcaaaaaggatcttcacctagatccttttaaattaaaaatgaagttttaaatcaatctaaagtatatatgagtaaacttggtctgacagttaccaatgcttaatcagtgaggcacctatctcagcgatctgtctatttcgttcatccatagttgcctgactccccgtcgtgtagataactacgatacgggagggcttaccatctggccccagtgctgcaatgataccgcgagacccacgctcaccggctccagatttatcagcaataaaccagccagccggaagggccgagcgcagaagtggtcctgcaactttatccgcctccatccagtctattaattgttgccgggaagctagagtaagtagttcgccagttaatagtttgcgcaacgttgttgccattgctacaggcatcgtggtgtcacgctcgtcgtttggtatggcttcattcagctccggttcccaacgatcaaggcgagttacatgatcccccatgttgtgcaaaaaagcggttagctccttcggtcctccgatcgttgtcagaagtaagttggccgcagtgttatcactcatggttatggcagcactgcataattctcttactgtcatgccatccgtaagatgcttttctgtgactggtgagtactcaaccaagtcattctgagaatagtgtatgcggcgaccgagttgctcttgcccggcgtcaatacgggataataccgcgccacatagcagaactttaaaagtgctcatcattggaaaacgttcttcggggcgaaaactctcaaggatcttaccgctgttgagatccagttcgatgtaacccactcgtgcacccaactgatcttcagcatcttttactttcaccagcgtttctgggtgagcaaaaacaggaaggcaaaatgccgcaaaaaagggaataagggcgacacggaaatgttgaatactcatactcttcctttttcaatattattgaagcatttatcagggttattgtctcatgagcggatacatatttgaatgtatttagaaaaataaacaaataggggttccgcgcacatttccccgaaaagtgccacctgaacgaagcatctgtgcttcattttgtagaacaaaaatgcaacgcgagagcgctaatttttcaaacaaagaatctgagctgcatttttacagaacagaaatgcaacgcgaaagcgctattttaccaacgaagaatctgtgcttcatttttgtaaaacaaaaatgcaacgcgagagcgctaatttttcaaacaaagaatctgagctgcatttttacagaacagaaatgcaacgcgagagcgctattttaccaacaaagaatctatacttcttttttgttctacaaaaatgcatcccgagagcgctatttttctaacaaagcatcttagattactttttttctcctttgtgcgctctataatgcagtctcttgataactttttgcactgtaggtccgttaaggttagaagaaggctactttggtgtctattttctcttccataaaaaaagcctgactccacttcccgcgtttactgattactagcgaagctgcgggtgcattttttcaagataaaggcatccccgattatattctataccgatgtggattgcgcatactttgtgaacagaaagtgatagcgttgatgattcttcattggtcagaaaattatgaacggtttcttctattttgtctctatatactacgtataggaaatgtttacattttcgtattgttttcgattcactctatgaatagttcttactacaatttttttgtctaaagagtaatactagagataaacataaaaaatgtagaggtcgagtttagatgcaagttcaaggagcgaaaggtggatgggtaggttatatagggatatagcacagagatatatagcaaagagatacttttgagcaatgtttgtggaagcggtattcgcaatattttagtagctcgttacagtccggtgcgtttttggttttttgaaagtgcgtcttcagagcgcttttggttttcaaaagcgctctgaagttcctatactttctagagaataggaacttcggaataggaacttcaaagcgtttccgaaaacgagcgcttccgaaaatgcaacgcgagctgcgcacatacagctcactgttcacgtcgcacctatatctgcgtgttgcctgtatatatatatacatgagaagaacggcatagtgcgtgtttatgcttaaatgcgtacttatatgcgtctatttatgtaggatgaaaggtagtctagtacctcctgtgatattatcccattccatgcggggtatcgtatgcttccttcagcactaccctttagctgttctatatgctgccactcctcaattggattagtctcatccttcaatgctatcatttcctttgatattggatcatactaagaaaccattattatcatgacattaacctataaaaataggcgtatcacgaggccctttcgtc

SEQ ID NO: 3 - DNA, 4586 bp, Artificial sequence
  Template
gggtaccgagctcgaattcactggccgtcgttttacaacgtcgtgactgggaaaaccctggcgttacccaacttaatcgccttgcagcacatccccctttcgccagctggcgtaatagcgaagaggcccgcaccgatcgcccttcccaacagttgcgcagcctgaatggcgaatggcgcctgatgcggtattttctccttacgcatctgtgcggtatttcacaccgcatatggtgcactctcagtacaatctgctctgatgccgcatagttaagccagccccgacacccgccaacacccgctgacgcgccctgacgggcttgtctgctcccggcatccgcttacagacaagctgtgaccgtctccgggagctgcatgtgtcagaggttttcaccgtcatcaccgaaacgcgcgagacgaaagggcctcgtgatacgcctatttttataggttaatgtcatgataataatggtttcttagacgtcaggtggcacttttcggggaaatgtgcgcggaacccctatttgtttatttttctaaatacattcaaatatgtatccgctcatgagacaataaccctgataaatgcttcaataatattgaaaaaggaagagtatgagtattcaacatttccgtgtcgcccttattcccttttttgcggcattttgccttcctgtttttgctcacccagaaacgctggtgaaagtaaaagatgctgaagatcagttgggtgcacgagtgggttacatcgaactggatctcaacagcggtaagatccttgagagttttcgccccgaagaacgttttccaatgatgagcacttttaaagttctgctatgtggcgcggtattatcccgtattgacgccgggcaagagcaactcggtcgccgcatacactattctcagaatgacttggttgagtactcaccagtcacagaaaagcatcttacggatggcatgacagtaagagaattatgcagtgctgccataaccatgagtgataacactgcggccaacttacttctgacaacgatcggaggaccgaaggagctaaccgcttttttgcacaacatgggggatcatgtaactcgccttgatcgttgggaaccggagctgaatgaagccataccaaacgacgagcgtgacaccacgatgcctgtagcaatggcaacaacgttgcgcaaactattaactggcgaactacttactctagcttcccggcaacaattaatagactggatggaggcggataaagttgcaggaccacttctgcgctcggcccttccggctggctggtttattgctgataaatctggagccggtgagcgtgggtctcgcggtatcattgcagcactggggccagatggtaagccctcccgtatcgtagttatctacacgacggggagtcaggcaactatggatgaacgaaatagacagatcgctgagataggtgcctcactgattaagcattggtaactgtcagaccaagtttactcatatatactttagattgatttaaaacttcatttttaatttaaaaggatctaggtgaagatcctttttgataatctcatgaccaaaatcccttaacgtgagttttcgttccactgagcgtcagaccccgtagaaaagatcaaaggatcttcttgagatcctttttttctgcgcgtaatctgctgcttgcaaacaaaaaaaccaccgctaccagcggtggtttgtttgccggatcaagagctaccaactctttttccgaaggtaactggcttcagcagagcgcagataccaaatactgtccttctagtgtagccgtagttaggccaccacttcaagaactctgtagcaccgcctacatacctcgctctgctaatcctgttaccagtggctgctgccagtggcgataagtcgtgtcttaccgggttggactcaagacgatagttaccggataaggcgcagcggtcgggctgaacggggggttcgtgcacacagcccagcttggagcgaacgacctacaccgaactgagatacctacagcgtgagctatgagaaagcgccacgcttcccgaagggagaaaggcggacaggtatccggtaagcggcagggtcggaacaggagagcgcacgagggagcttccagggggaaacgcctggtatctttatagtcctgtcgggtttcgccacctctgacttgagcgtcgatttttgtgatgctcgtcaggggggcggagcctatggaaaaacgccagcaacgcggcctttttacggttcctggccttttgctggccttttgctcacatgttctttcctgcgttatcccctgattctgtggataaccgtattaccgcctttgagtgagctgataccgctcgccgcagccgaacgaccgagcgcagcgagtcagtgagcgaggaagcggaagagcgcccaatacgcaaaccgcctctccccgcgcgttggccgattcattaatgcagctggcacgacaggtttcccgactggaaagcgggcagtgagcgcaacgcaattaatgtgagttagctcactcattaggcaccccaggctttacactttatgcttccggctcgtatgttgtgtggaattgtgagcggataacaatttcacacaggaaacagctatgaccatgattacgccaagcttgcatgcctgcaggtcgactctagaggatccccgcattgcggattacgtattctaatgttcagataacttcgtatagcatacattatacgaagttatctagggattcataaccattttctcaatcgaattacacagaacacaccgtacaaacctctctatcataactacttaatagtcacacacgtactcgtctaaatacacatcatcgtcctacaagttcatcaaagtgttggacagacaactataccagcatggatctcttgtatcggttcttttctcccgctctctcgcaataacaatgaacactgggtcaatcatagcctacacaggtgaacagagtagcgtttatacagggtttatacggtgattcctacggcaaaaatttttcatttctaaaaaaaaaaagaaaaatttttctttccaacgctagaaggaaaagaaaaatctaattaaattgatttggtgattttctgagagttccctttttcatatatcgaattttgaatataaaaggagatcgaaaaaatttttctattcaatctgttttctggttttatttgatagtttttttgtgtattattattatggattagtactggtttatatgggtttttctgtataacttctttttattttagtttgtttaatcttattttgagttacattatagttccctaactgcaagagaagtaacattaaaactcgagatgggtaaggaaaagactcacgtttcgaggccgcgattaaattccaacatggatgctgatttatatgggtataaatgggctcgcgataatgtcgggcaatcaggtgcgacaatctatcgattgtatgggaagcccgatgcgccagagttgtttctgaaacatggcaaaggtagcgttgccaatgatgttacagatgagatggtcagactaaactggctgacggaatttatgcctcttccgaccatcaagcattttatccgtactcctgatgatgcatggttactcaccactgcgatccccggcaaaacagcattccaggtattagaagaatatcctgattcaggtgaaaatattgttgatgcgctggcagtgttcctgcgccggttgcattcgattcctgtttgtaattgtccttttaacagcgatcgcgtatttcgtctcgctcaggcgcaatcacgaatgaataacggtttggttgatgcgagtgattttgatgacgagcgtaatggctggcctgttgaacaagtctggaaagaaatgcataagcttttgccattctcaccggattcagtcgtcactcatggtgatttctcacttgataaccttatttttgacgaggggaaattaataggttgtattgatgttggacgagtcggaatcgcagaccgataccaggatcttgccatcctatggaactgcctcggtgagttttctccttcattacagaaacggctttttcaaaaatatggtattgataatcctgatatgaataaattgcagtttcatttgatgctcgatgagtttttctaagtttaacttgatactactagattttttctcttcatttataaaatttttggttataattgaagctttagaagtatgaaaaaatccttttttttcattctttgcaaccaaaataagaagcttcttttattcattgaaatgatgaatataaacctaacaaaagaaaaagactcgaatatcaaacattaaaaaaaaataaaagaggttatctgttttcccatttagttggagtttgcattttctaatagatagaactctcaattaatgtggatttagtttctctgttcgtttttttttgttttgttctcactgtatttacatttctatttagtatttagttattcatataatctataacttcgtatagcatacattatacgaagttatccagtgatgatacaacgagttagccaaggtg

SEQ ID NO: 4 - DNA, 80 bp, Artificial sequence
  Primer
ttccggtttctttgaaatttttttgattcggtaatctccgagcagaaggagcattgcggattacgtattctaatgttcag

SEQ ID NO: 5 - DNA, 81 bp, Artificial sequence
  Primer
gggtaataactgatataattaaattgaagctctaatttgtgagtttagtacaccttggctaactcgttgtatcatcactgg

SEQ ID NO: 6 - DNA, 38 bp, Artificial sequence
  Primer
gcctcgagttttaatgttacttctcttgcagttaggga

SEQ ID NO: 7 - DNA, 31 bp, Artificial sequence
  Primer
gctaaattcgagtgaaacacaggaagaccag

SEQ ID NO: 8 - DNA, 90 bp, Artificial sequence
  Primer
gtattttggtagattcaattctctttccctttccttttccttcgctccccttccttatcagcattgcggattacgtattctaatgttcag

SEQ ID NO: 9 - DNA, 90 bp, Artificial sequence
  Primer
ttggttgggggaaaaagaggcaacaggaaagatcagagggggagggggggggagagtgtcaccttggctaactcgttgtatcatcactgg

SEQ ID NO: 10 - DNA, 21 bp, Artificial sequence
  Primer
tcggtgcgggcctcttcgcta

SEQ ID NO: 11 - DNA, 21 bp, Artificial sequence
  Primer
aatgtgagttagctcactcat

SEQ ID NO: 12 - DNA, 57 bp, Artificial sequence
  Primer
aattggatccggcgcgccgtttaaacggccggccaatgtggctgtggtttcagggtc

SEQ ID NO: 13 - DNA, 49 bp, Artificial sequence
  Primer
aatttctagattaattaagcggccgcaaggccatgaagctttttctttc

SEQ ID NO: 14 - DNA, 24 bp, Artificial sequence
  Primer
ttctcgacgtgggcctttttcttg

SEQ ID NO: 15 - DNA, 49 bp, Artificial sequence
  Primer
tgcagctttaaataatcggtgtcactactttgccttcgtttatcttgcc

SEQ ID NO: 16 - DNA, 49 bp, Artificial sequence
  Primer
gagcaggcaagataaacgaaggcaaagtagtgacaccgattatttaaag

SEQ ID NO: 17 - DNA, 49 bp, Artificial sequence
  Primer
tatggaccctgaaaccacagccacattgtaaccaccacgacggttgttg

SEQ ID NO: 18 - DNA, 49 bp, Artificial sequence
  Primer
tttagcaacaaccgtcgtggtggttacaatgtggctgtggtttcagggt

SEQ ID NO: 19 - DNA, 49 bp, Artificial sequence
  Primer
ccagaaaccctatacctgtgtggacgtaaggccatgaagctttttcttt

SEQ ID NO: 20 - DNA, 49 bp, Artificial sequence
  Primer
attggaaagaaaaagcttcatggccttacgtccacacaggtatagggtt

SEQ ID NO: 21 - DNA, 22 bp, Artificial sequence
  Primer
cataagaacacctttggtggag

SEQ ID NO: 22 - DNA, 22 bp, Artificial sequence
  Primer
aggattatcattcataagtttc

SEQ ID NO: 23 - DNA, 23 bp, Artificial sequence
  Primer
ttcttggagctgggacatgtttg

SEQ ID NO: 24 - DNA, 22 bp, Artificial sequence
  Primer
tgatgatatttcataaataatg

SEQ ID NO: 25 - DNA, 23 bp, Artificial sequence
  Primer
atgcgtccatctttacagtcctg

SEQ ID NO: 26 - DNA, 22 bp, Artificial sequence
  Primer
tacgtacggaccaatcgaagtg

SEQ ID NO: 27 - DNA, 49 bp, Artificial sequence
  Primer
aattcgtttgagtacactactaatggctttgttggcaatatgtttttgc

SEQ ID NO: 28 - DNA, 49 bp, Artificial sequence
  Primer
atatagcaaaaacatattgccaacaaagccattagtagtgtactcaaac

SEQ ID NO: 29 - DNA, 49 bp, Artificial sequence
  Primer
tatggaccctgaaaccacagccacattcttgttatttataaaaagacac

SEQ ID NO: 30 - DNA, 49 bp, Artificial sequence
  Primer
ctcccgtgtctttttataaataacaagaatgtggctgtggtttcagggt

SEQ ID NO: 31 - DNA, 49 bp, Artificial sequence
  Primer
taccgtaggcgtccttaggaaagatagaaggccatgaagctttttcttt

SEQ ID NO: 32 - DNA, 49 bp, Artificial sequence
  Primer
attggaaagaaaaagcttcatggccttctatctttcctaaggacgccta

SEQ ID NO: 33 - DNA, 21 bp, Artificial sequence
  Primer
ttattgtttggcatttgtagc

SEQ ID NO: 34 - DNA, 22 bp, Artificial sequence
  Primer
ccaagcatctcataaacctatg

SEQ ID NO: 35 - DNA, 22 bp, Artificial sequence
  Primer
tgtgcagatgcagatgtgagac

SEQ ID NO: 36 - DNA, 17 bp, Artificial sequence
  Primer
agttattgataccgtac

SEQ ID NO: 37 - DNA, 19 bp, Artificial sequence
  Primer
cgagataccgtaggcgtcc

SEQ ID NO: 38 - DNA, 24 bp, Artificial sequence
  Primer
ttatgtatgctcttctgacttttc

SEQ ID NO: 39 - DNA, 49 bp, Artificial sequence
  Primer
aataattagagattaaatcgctcattttttgccagtttcttcaggcttc

SEQ ID NO: 40 - DNA, 49 bp, Artificial sequence
  Primer
agcctgaagaaactggcaaaaaatgagcgatttaatctctaattattag

SEQ ID NO: 41 - DNA, 49 bp, Artificial sequence
  Primer
tatggaccctgaaaccacagccacatttttcaatcattggagcaatcat

SEQ ID NO: 42 - DNA, 49 bp, Artificial sequence
  Primer
taaaatgattgctccaatgattgaaaaatgtggctgtggtttcagggtc

SEQ ID NO: 43 - DNA, 49 bp, Artificial sequence
  Primer
accgtaggtgttgtttgggaaagtggaaggccatgaagctttttctttc

SEQ ID NO: 44 - DNA, 49 bp, Artificial sequence
  Primer
ttggaaagaaaaagcttcatggccttccactttcccaaacaacacctac

SEQ ID NO: 45 - DNA, 23 bp, Artificial sequence
  Primer
ttattgcttagcgttggtagcag

SEQ ID NO: 46 - DNA, 21 bp, Artificial sequence
  Primer
tttttggtggttccggcttcc

SEQ ID NO: 47 - DNA, 22 bp, Artificial sequence
  Primer
aaagttggcatagcggaaactt

SEQ ID NO: 48 - DNA, 16 bp, Artificial sequence
  Primer
gtcattgacaccatct

SEQ ID NO: 49 - DNA, 19 bp, Artificial sequence
  Primer
agagataccgtaggtgttg

SEQ ID NO: 50 - DNA, 33 bp, Artificial sequence
  Primer
aattggcgcgccatgaaagctctggtttatcac

SEQ ID NO: 51 - DNA, 49 bp, Artificial sequence
  Primer
tgaatcatgagttttatgttaattagctcaggcagcgcctgcgttcgag

SEQ ID NO: 52 - DNA, 49 bp, Artificial sequence
  Primer
atcctctcgaacgcaggcgctgcctgagctaattaacataaaactcatg

SEQ ID NO: 53 - DNA, 34 bp, Artificial sequence
  Primer
aattgtttaaacaagtaaataaattaatcagcat

SEQ ID NO: 54 - DNA, 49 bp, Artificial sequence
  Primer
acacaatacaataacaagaagaacaaaatgaaagctctggtttatcacg

SEQ ID NO: 55 - DNA, 49 bp, Artificial sequence
  Primer
agcgtatacatctgttgggaaagtagaaggccatgaagctttttctttc

SEQ ID NO: 56 - DNA, 49 bp, Artificial sequence
  Primer
ttggaaagaaaaagcttcatggccttctactttcccaacagatgtatac

SEQ ID NO: 57 - DNA, 22 bp, Artificial sequence
  Primer
ttattgtttagcgttagtagcg

SEQ ID NO: 58 - DNA, 72 bp, Artificial sequence
  Primer
cataatcaatctcaaagagaacaacacaatacaataacaagaagaacaaaatgaaagctctggtttatcacg

SEQ ID NO: 59 - DNA, 21 bp, Artificial sequence
  Primer
taggcataatcaccgaagaag

SEQ ID NO: 60 - DNA, 21 bp, Artificial sequence
  Primer
aaaatggtaagcagctgaaag

SEQ ID NO: 61 - DNA, 17 bp, Artificial sequence
  Primer
agttgttagaactgttg

SEQ ID NO: 62 - DNA, 19 bp, Artificial sequence
  Primer
gacgatagcgtatacatct

SEQ ID NO: 63 - DNA, 22 bp, Artificial sequence
  Primer
cttagcctctagccatagccat

SEQ ID NO: 64 - DNA, 23 bp, Artificial sequence
  Primer
ttagttttgctggccgcatcttc

SEQ ID NO: 65 - DNA, 21 bp, Artificial sequence
  Primer
cccattaatatactattgaga

SEQ ID NO: 66 - DNA, 7523 bp, Artificial sequence
  Plasmid
ccagcttttgttccctttagtgagggttaattgcgcgcttggcgtaatcatggtcatagctgtttcctgtgtgaaattgttatccgctcacaattccacacaacataggagccggaagcataaagtgtaaagcctggggtgcctaatgagtgaggtaactcacattaattgcgttgcgctcactgcccgctttccagtcgggaaacctgtcgtgccagctgcattaatgaatcggccaacgcgcggggagaggcggtttgcgtattgggcgctcttccgcttcctcgctcactgactcgctgcgctcggtcgttcggctgcggcgagcggtatcagctcactcaaaggcggtaatacggttatccacagaatcaggggataacgcaggaaagaacatgtgagcaaaaggccagcaaaaggccaggaaccgtaaaaaggccgcgttgctggcgtttttccataggctccgcccccctgacgagcatcacaaaaatcgacgctcaagtcagaggtggcgaaacccgacaggactataaagataccaggcgtttccccctggaagctccctcgtgcgctctcctgttccgaccctgccgcttaccggatacctgtccgcctttctcccttcgggaagcgtggcgctttctcatagctcacgctgtaggtatctcagttcggtgtaggtcgttcgctccaagctgggctgtgtgcacgaaccccccgttcagcccgaccgctgcgccttatccggtaactatcgtcttgagtccaacccggtaagacacgacttatcgccactggcagcagccactggtaacaggattagcagagcgaggtatgtaggcggtgctacagagttcttgaagtggtggcctaactacggctacactagaaggacagtatttggtatctgcgctctgctgaagccagttaccttcggaaaaagagttggtagctcttgatccggcaaacaaaccaccgctggtagcggtggtttttttgtttgcaagcagcagattacgcgcagaaaaaaaggatctcaagaagatcctttgatcttttctacggggtctgacgctcagtggaacgaaaactcacgttaagggattttggtcatgagattatcaaaaaggatcttcacctagatccttttaaattaaaaatgaagttttaaatcaatctaaagtatatatgagtaaacttggtctgacagttaccaatgcttaatcagtgaggcacctatctcagcgatctgtctatttcgttcatccatagttgcctgactccccgtcgtgtagataactacgatacgggagggcttaccatctggccccagtgctgcaatgataccgcgagacccacgctcaccggctccagatttatcagcaataaaccagccagccggaagggccgagcgcagaagtggtcctgcaactttatccgcctccatccagtctattaattgttgccgggaagctagagtaagtagttcgccagttaatagtttgcgcaacgttgttgccattgctacaggcatcgtggtgtcacgctcgtcgtttggtatggcttcattcagctccggttcccaacgatcaaggcgagttacatgatcccccatgttgtgcaaaaaagcggttagctccttcggtcctccgatcgttgtcagaagtaagttggccgcagtgttatcactcatggttatggcagcactgcataattctcttactgtcatgccatccgtaagatgcttttctgtgactggtgagtactcaaccaagtcattctgagaatagtgtatgcggcgaccgagttgctcttgcccggcgtcaatacgggataataccgcgccacatagcagaactttaaaagtgctcatcattggaaaacgttcttcggggcgaaaactctcaaggatcttaccgctgttgagatccagttcgatgtaacccactcgtgcacccaactgatcttcagcatcttttactttcaccagcgtttctgggtgagcaaaaacaggaaggcaaaatgccgcaaaaaagggaataagggcgacacggaaatgttgaatactcatactcttcctttttcaatattattgaagcatttatcagggttattgtctcatgagcggatacatatttgaatgtatttagaaaaataaacaaataggggttccgcgcacatttccccgaaaagtgccacctgaacgaagcatctgtgcttcattttgtagaacaaaaatgcaacgcgagagcgctaatttttcaaacaaagaatctgagctgcatttttacagaacagaaatgcaacgcgaaagcgctattttaccaacgaagaatctgtgcttcatttttgtaaaacaaaaatgcaacgcgagagcgctaatttttcaaacaaagaatctgagctgcatttttacagaacagaaatgcaacgcgagagcgctattttaccaacaaagaatctatacttcttttttgttctacaaaaatgcatcccgagagcgctatttttctaacaaagcatcttagattactttttttctcctttgtgcgctctataatgcagtctcttgataactttttgcactgtaggtccgttaaggttagaagaaggctactttggtgtctattttctcttccataaaaaaagcctgactccacttcccgcgtttactgattactagcgaagctgcgggtgcattttttcaagataaaggcatccccgattatattctataccgatgtggattgcgcatactttgtgaacagaaagtgatagcgttgatgattcttcattggtcagaaaattatgaacggtttcttctattttgtctctatatactacgtataggaaatgtttacattttcgtattgttttcgattcactctatgaatagttcttactacaatttttttgtctaaagagtaatactagagataaacataaaaaatgtagaggtcgagtttagatgcaagttcaaggagcgaaaggtggatgggtaggttatatagggatatagcacagagatatatagcaaagagatacttttgagcaatgtttgtggaagcggtattcgcaatattttagtagctcgttacagtccggtgcgtttttggttttttgaaagtgcgtcttcagagcgcttttggttttcaaaagcgctctgaagttcctatactttctagagaataggaacttcggaataggaacttcaaagcgtttccgaaaacgagcgcttccgaaaatgcaacgcgagctgcgcacatacagctcactgttcacgtcgcacctatatctgcgtgttgcctgtatatatatatacatgagaagaacggcatagtgcgtgtttatgcttaaatgcgtacttatatgcgtctatttatgtaggatgaaaggtagtctagtacctcctgtgatattatcccattccatgcggggtatcgtatgcttccttcagcactaccctttagctgttctatatgctgccactcctcaattggattagtctcatccttcaatgctatcatttcctttgatattggatcatctaagaaaccattattatcatgacattaacctataaaaataggcgtatcacgaggccctttcgtctcgcgcgtttcggtgatgacggtgaaaacctctgacacatgcagctcccggagacggtcacagcttgtctgtaagcggatgccgggagcagacaagcccgtcagggcgcgtcagcgggtgttggcgggtgtcggggctggcttaactatgcggcatcagagcagattgtactgagagtgcaccataaattcccgttttaagagcttggtgagcgctaggagtcactgccaggtatcgtttgaacacggcattagtcagggaagtcataacacagtcctttcccgcaattttctttttctattactcttggcctcctctagtacactctatatttttttatgcctcggtaatgattttcatttttttttttcccctagcggatgactctttttttttcttagcgattggcattatcacataatgaattatacattatataaagtaatgtgatttcttcgaagaatatactaaaaaatgagcaggcaagataaacgaaggcaaagatgacagagcagaaagccctagtaaagcgtattacaaatgaaaccaagattcagattgcgatctctttaaagggtggtcccctagcgatagagcactcgatcttcccagaaaaagaggcagaagcagtagcagaacaggccacacaatcgcaagtgattaacgtccacacaggtatagggtttctggaccatatgatacatgctctggccaagcattccggctggtcgctaatcgttgagtgcattggtgacttacacatagacgaccatcacaccactgaagactgcgggattgctctcggtcaagcttttaaagaggccctactggcgcgtggagtaaaaaggtttggatcaggatttgcgcctttggatgaggcactttccagagcggtggtagatctttcgaacaggccgtacgcagttgtcgaacttggtttgcaaagggagaaagtaggagatctctcttgcgagatgatcccgcattttcttgaaagctttgcagaggctagcagaattaccctccacgttgattgtctgcgaggcaagaatgatcatcaccgtagtgagagtgcgttcaaggctcttgcggttgccataagagaagccacctcgcccaatggtaccaacgatgttccctccaccaaaggtgttcttatgtagtgacaccgattatttaaagctgcagcatacgatatatatacatgtgtatatatgtatacctatgaatgtcagtaagtatgtatacgaacagtatgatactgaagatgacaaggtaatgcatcattctatacgtgtcattctgaacgaggcgcgctttccttttttctttttgctttttctttttttttctcttgaactcgacggatctatgcggtgtgaaataccgcacagatgcgtaaggagaaaataccgcatcaggaaattgtaaacgttaatattttgttaaaattcgcgttaaatttttgttaaatcagctcattttttaaccaataggccgaaatcggcaaaatcccttataaatcaaaagaatagaccgagatagggttgagtgttgttccagtttggaacaagagtccactattaaagaacgtggactccaacgtcaaagggcgaaaaaccgtctatcagggcgatggcccactacgtgaaccatcaccctaatcaagttttttggggtcgaggtgccgtaaagcactaaatcggaaccctaaagggagcccccgatttagagcttgacggggaaagccggcgaacgtggcgagaaaggaagggaagaaagcgaaaggagcgggcgctagggcgctggcaagtgtagcggtcacgctgcgcgtaaccaccacacccgccgcgcttaatgcgccgctacagggcgcgtcgcgccattcgccattcaggctgcgcaactgttgggaagggcgatcggtgcgggcctcttcgctattacgccagctggcgaaagggggatgtgctgcaaggcgattaagttgggtaacgccagggttttcccagtcacgacgttgtaaaacgacggccagtgagcgcgcgtaatacgactcactatagggcgaattgggtaccgggccccccctcgaggtattagaagccgccgagcgggcgacagccctccgacggaagactctcctccgtgcgtcctcgtcttcaccggtcgcgttcctgaaacgcagatgtgcctcgcgccgcactgctccgaacaataaagattctacaatactagcttttatggttatgaagaggaaaaattggcagtaacctggccccacaaaccttcaaattaacgaatcaaattaacaaccataggatgataatgcgattagttttttagccttatttctggggtaattaatcagcgaagcgatgatttttgatctattaacagatatataaatggaaaagctgcataaccactttaactaatactttcaacattttcagtttgtattacttcttattcaaatgtcataaaagtatcaacaaaaaattgttaatatacctctatactttaacgtcaaggagaaaaatgtccaatttactgcccgtacaccaaaatttgcctgcattaccggtcgatgcaacgagtgatgaggttcgcaagaacctgatggacatgttcagggatcgccaggcgttttctgagcatacctggaaaatgcttctgtccgtttgccggtcgtgggcggcatggtgcaagttgaataaccggaaatggtttcccgcagaacctgaagatgttcgcgattatcttctatatcttcaggcgcgcggtctggcagtaaaaactatccagcaacatttgggccagctaaacatgcttcatcgtcggtccgggctgccacgaccaagtgacagcaatgctgtttcactggttatgcggcggatccgaaaagaaaacgttgatgccggtgaacgtgcaaaacaggctctagcgttcgaacgcactgatttcgaccaggttcgttcactcatggaaaatagcgatcgctgccaggatatacgtaatctggcatttctggggattgcttataacaccctgttacgtatagccgaaattgccaggatcagggttaaagatatctcacgtactgacggtgggagaatgttaatccatattggcagaacgaaaacgctggttagcaccgcaggtgtagagaaggcacttagcctgggggtaactaaactggtcgagcgatggatttccgtctctggtgtagctgatgatccgaataactacctgttttgccgggtcagaaaaaatggtgttgccgcgccatctgccaccagccagctatcaactcgcgccctggaagggatttttgaagcaactcatcgattgatttacggcgctaaggatgactctggtcagagatacctggcctggtctggacacagtgcccgtgtcggagccgcgcgagatatggcccgcgctggagtttcaataccggagatcatgcaagctggtggctggaccaatgtaaatattgtcatgaactatatccgtaacctggatagtgaaacaggggcaatggtgcgcctgctggaagatggcgattaggagtaagcgaatttcttatgatttatgatttttattattaaataagttataaaaaaaataagtgtatacaaattttaaagtgactcttaggttttaaaacgaaaattcttattcttgagtaactctttcctgtaggtcaggttgctttctcaggtatagcatgaggtcgctcttattgaccacacctctaccggcatgccgagcaaatgcctgcaaatcgctccccatttcacccaattgtagatatgctaactccagcaatgagttgatgaatctcggtgtgtattttatgtcctcagaggacaacacctgtggtccgccaccgcggtggagct

SEQ ID NO: 67 - DNA, 15456 bp, Artificial sequence
  Template
aaagagtaatactagagataaacataaaaaatgtagaggtcgagtttagatgcaagttcaaggagcgaaaggtggatgggtaggttatatagggatatagcacagagatatatagcaaagagatacttttgagcaatgtttgtggaagcggtattcgcaatattttagtagctcgttacagtccggtgcgtttttggttttttgaaagtgcgtcttcagagcgcttttggttttcaaaagcgctctgaagttcctatactttctagagaataggaacttcggaataggaacttcaaagcgtttccgaaaacgagcgcttccgaaaatgcaacgcgagctgcgcacatacagctcactgttcacgtcgcacctatatctgcgtgttgcctgtatatatatatacatgagaagaacggcatagtgcgtgtttatgcttaaatgcgtacttatatgcgtctatttatgtaggatgaaaggtagtctagtacctcctgtgatattatcccattccatgcggggtatcgtatgcttccttcagcactaccctttagctgttctatatgctgccactcctcaattggattagtctcatccttcaatgctatcatttcctttgatattggatcatactaagaaaccattattatcatgacattaacctataaaaataggcgtatcacgaggccctttcgtctcgcgcgtttcggtgatgacggtgaaaacctctgacacatgcagctcccggagacggtcacagcttgtctgtaagcggatgccgggagcagacaagcccgtcagggcgcgtcagcgggtgttggcgggtgtcggggctggcttaactatgcggcatcagagcagattgtactgagagtgcaccataaattcccgttttaagagcttggtgagcgctaggagtcactgccaggtatcgtttgaacacggcattagtcagggaagtcataacacagtcctttcccgcaattttctttttctattactcttggcctcctctagtacactctatatttttttatgcctcggtaatgattttcatttttttttttccacctagcggatgactctttttttttcttagcgattggcattatcacataatgaattatacattatataaagtaatgtgatttcttcgaagaatatactaaaaaatgagcaggcaagataaacgaaggcaaagatgacagagcagaaagccctagtaaagcgtattacaaatgaaaccaagattcagattgcgatctctttaaagggtggtcccctagcgatagagcactcgatcttcccagaaaaagaggcagaagcagtagcagaacaggccacacaatcgcaagtgattaacgtccacacaggtatagggtttctggaccatatgatacatgctctggccaagcattccggctggtcgctaatcgttgagtgcattggtgacttacacatagacgaccatcacaccactgaagactgcgggattgctctcggtcaagcttttaaagaggccctaggggccgtgcgtggagtaaaaaggtttggatcaggatttgcgcctttggatgaggcactttccagagcggtggtagatctttcgaacaggccgtacgcagttgtcgaacttggtttgcaaagggagaaagtaggagatctctcttgcgagatgatcccgcattttcttgaaagctttgcagaggctagcagaattaccctccacgttgattgtctgcgaggcaagaatgatcatcaccgtagtgagagtgcgttcaaggctcttgcggttgccataagagaagccacctcgcccaatggtaccaacgatgttccctccaccaaaggtgttcttatgtagtgacaccgattatttaaagctgcagcatacgatatatatacatgtgtatatatgtatacctatgaatgtcagtaagtatgtatacgaacagtatgatactgaagatgacaaggtaatgcatcattctatacgtgtcattctgaacgaggcgcgctttccttttttctttttgctttttctttttttttctcttgaactcgacggatctatgcggtgtgaaataccgcacagatgcgtaaggagaaaataccgcatcaggaaattgtaagcgttaatattttgttaaaattcgcgttaaatttttgttaaatcagctcattttttaaccaataggccgaaatcggcaaaatcccttataaatcaaaagaatagaccgagatagggttgagtgttgttccagtttggaacaagagtccactattaaagaacgtggactccaacgtcaaagggcgaaaaaccgtctatcagggcgatggcccactacgtgaaccatcaccctaatcaagttttttggggtcgaggtgccgtaaagcactaaatcggaaccctaaagggagcccccgatttagagcttgacggggaaagccggcgaacgtggcgagaaaggaagggaagaaagcgaaaggagcgggcgctagggcgctggcaagtgtagcggtcacgctgcgcgtaaccaccacacccgccgcgcttaatgcgccgctacagggcgcgtccattcgccattcaggctgcgcaactgttgggaagggcgcggtgcgggcctcttcgctattacgccagctggcgaaagggggatgtgctgcaaggcgattaagttgggtaacgccagggttttcccagtcacgacgttgtaaaacgacggccagtgagcgcgcgtaatacgactcactatagggcgaattgggtaccgggccccccctcgaggtcgacggcgcgccactggtagagagcgactttgtatgccccaattgcgaaacccgcgatatccttctcgattctttagtacccgaccaggacaaggaaaaggaggtcgaaacgtttttgaagaaacaagaggaactacacggaagctctaaagatggcaaccagccagaaactaagaaaatgaagttgatggatccaactggcaccgctggcttgaacaacaataccagccttccaacttctgtaaataacggcggtacgccagtgccaccagtaccgttacctttcggtatacctcctttccccatgtttccaatgcccttcatgcctccaacggctactatcacaaatcctcatcaagctgacgcaagccctaagaaatgaataacaatactgacagtactaaataattgcctacttggcttcacatacgttgcatacgtcgatatagataataatgataatgacagcaggattatcgtaatacgtaatagctgaaaatctcaaaaatgtgtgggtcattacgtaaataatgataggaatgggattcttctatttttcctttttccattctagcagccgtcgggaaaacgtggcatcctctctttcgggctcaattggagtcacgctgccgtgagcatcctctctttccatatctaacaactgagcacgtaaccaatggaaaagcatgagcttagcgttgctccaaaaaagtattggatggttaataccatttgtctgttctcttctgactttgactcctcaaaaaaaaaaatctacaatcaacagatcgcttcaattacgccctcacaaaaacttttttccttcttcttcgcccacgttaaattttatccctcatgttgtctaacggatttctgcacttgatttattataaaaagacaaagacataatacttctctatcaatttcagttattgttcttccttgcgttattcttctgttcttctttttcttttgtcatatataaccataaccaagtaatacatattcaaactagtatgactgacaaaaaaactcttaaagacttaagaaatcgtagttctgtttacgattcaatggttaaatcacctaatcgtgctatgttgcgtgcaactggtatgcaagatgaagactttgaaaaacctatcgtcggtgtcatttcaacttgggctgaaaacacaccttgtaatatccacttacatgactttggtaaactagccaaagtcggtgttaaggaagctggtgcttggccagttcagttcggaacaatcacggtttctgatggaatcgccatgggaacccaaggaatgcgtttctccttgacatctcgtgatattattgcagattctattgaagcagccatgggaggtcataatgcggatgcttttgtagccattggcggttgtgataaaaacatgcccggttctgttatcgctatggctaacatggatatcccagccatttttgcttacggcggaacaattgcacctggtaatttagacggcaaagatatcgatttagtctctgtctttgaaggtgtcggccattggaaccacggcgatatgaccaaagaagaagttaaagctttggaatgtaatgcttgtcccggtcctggaggctgcggtggtatgtatactgctaacacaatggcgacagctattgaagttttgggacttagccttccgggttcatcttctcacccggctgaatccgcagaaaagaaagcagatattgaagaagctggtcgcgctgttgtcaaaatgctcgaaatgggcttaaaaccttctgacattttaacgcgtgaagcttttgaagatgctattactgtaactatggctctgggaggttcaaccaactcaacccttcacctcttagctattgcccatgctgctaatgtggaattgacacttgatgatttcaatactttccaagaaaaagttcctcatttggctgatttgaaaccttctggtcaatatgtattccaagacctttacaaggtcggaggggtaccagcagttatgaaatatctccttaaaaatggcttccttcatggtgaccgtatcacttgtactggcaaaacagtcgctgaaaatttgaaggcttttgatgatttaacacctggtcaaaaggttattatgccgcttgaaaatcctaaacgtgaagatggtccgctcattattctccatggtaacttggctccagacggtgccgttgccaaagtttctggtgtaaaagtgcgtcgtcatgtcggtcctgctaaggtctttaattctgaagaagaagccattgaagctgtcttgaatgatgatattgttgatggtgatgttgttgtcgtacgttttgtaggaccaaagggcggtcctggtatgcctgaaatgctttccctttcatcaatgattgttggtaaagggcaaggtgaaaaagttgcccttctgacagatggccgcttctcaggtggtacttatggtcttgtcgtgggtcatatcgctcctgaagcacaagatggcggtccaatcgcctacctgcaaacaggagacatagtcactattgaccaagacactaaggaattacactttgatatctccgatgaagagttaaaacatcgtcaagagaccattgaattgccaccgctctattcacgcggtatccttggtaaatatgctcacatcgtttcgtctgcttctaggggagccgtaacagacttttggaagcctgaagaaactggcaaaaaatgttgtcctggttgctgtggttaagcggccgcgttaattcaaattaattgatatagttttttaatgagtattgaatctgtttagaaataatggaatattatttttatttatttatttatattattggtcggctcttttcttctgaaggtcaatgacaaaatgatatgaaggaaataatgatttctaaaattttacaacgtaagatatttttacaaaagcctagctcatcttttgtcatgcactattttactcacgcttgaaattaacggccagtccactgcggagtcatttcaaagtcatcctaatcgatctatcgtttttgatagctcattttggagttcgcgattgtcttctgttattcacaactgttttaatttttatttcattctggaactcttcgagttctttgtaaagtctttcatagtagcttactttatcctccaacatatttaacttcatgtcaatttcggctcttaaattttccacatcatcaagttcaacatcatcttttaacttgaatttattctctagctcttccaaccaagcctcattgctccttgatttactggtgaaaagtgatacactttgcgcgcaatccaggtcaaaactttcctgcaaagaattcaccaatttctcgacatcatagtacaatttgttttgttctcccatcacaatttaatatacctgatggattcttatgaagcgctgggtaatggacgtgtcactctacttcgcctttttccctactccttttagtacggaagacaatgctaataaataagagggtaataataatattattaatcggcaaaaaagattaaacgccaagcgtttaattatcagaaagcaaacgtcgtaccaatccttgaatgcttcccaattgtatattaagagtcatcacagcaacatattcttgttattaaattaattattattgatttttgatattgtataaaaaaaccaaatatgtataaaaaaagtgaataaaaaataccaagtatggagaaatatattagaagtctatacgttaaaccacccgggccccccctcgaggtcgacggtatcgataagcttgatatcgaattcctgcagcccgggggatccactagttctagagcggccgctctagaactagtaccacaggtgttgtcctctgaggacataaaatacacaccgagattcatcaactcattgctggagttagcatatctacaattgggtgaaatggggagcgatttgcaggcatttgctcggcatgccggtagaggtgtggtcaataagagcgacctcatgctatacctgagaaagcaacctgacctacaggaaagagttactcaagaataagaattttcgttttaaaacctaagagtcactttaaaatttgtatacacttattttttttataacttatttaataataaaaatcataaatcataagaaattcgcttactcttaattaatcaggcagcgcctgcgttcgagaggatgatcttcatcgccttctccttggcgccattgaggaatacctgataggcgtgctcgatctcggccagctcgaagcgatgggtaatcatcttcttcaacggaagcttgtcggtcgaggcgaccttcatcagcatgggcgtcgtgttcgtgttcaccagtcccgtggtgatcgtcaggttcttgatccagagcttctgaatctcgaagtcaaccttgacgccatgcacgccgacgttggcgatgtgcgcgccgggcttgacgatctcctggcagatgtcccaagtcgccggtatgcccaccgcctcgatcgcaacatcgactccctctgccgcaatcctatgcacggcttcgacaacgttctccgtgccggagttgatggtgtgcgttgccccgagctccttggcgagctggaggcgattctcgtccatgtcgatcacgatgatggtcgagggggagtagaactgggcggtcaacagtacggacatgccgacggggcccgcgccgacaatagccaccgcatcgcccggctggacattcccatactggacgccgatttcgtggccggtgggcaggatgtcgctcagcaggacggcgatttcgtcgtcaattgtctgggggatcttgtagaggctgttgtcggcatgcgggatgcggacgtattcggcctgcacgccatcgatcatgtaacccaggatccacccgccgtcgcggcaatgggagtaaagctgcttcttgcagtagtcgcacgagccgcaagaagtgacgcaggaaatcaggaccttgtcgcctttcttgaactgcgtgacactctcgcccacttcctcgatgacgcctaccccttcatggcccaggatgcgcccgtcggcgacctctggattcttgcctttgtagatgccgagatccgtgccgcagatcgtggtcttcaaaacccgtactactacatccgtgggcttttgaagggtgggcttgggcttgtcttcaagcgagatcttgtggtcaccgtgataaaccagagctttcatcctcagctattgtaatatgtgtgtttgtttggattattaagaagaataattacaaaaaaaattacaaaggaaggtaattacaacagaattaagaaaggacaagaaggaggaagagaatcagttcattatttcttctttgttatataacaaacccaagtagcgatttggccatacattaaaagttgagaaccaccctccctggcaacagccacaactcgttaccattgttcatcacgatcatgaaactcgctgtcagctgaaatttcacctcagtggatctctctttttattcttcatcgttccactaacctttttccatcagctggcagggaacggaaagtggaatcccatttagcgagcttcctcttttcttcaagaaaagacgaagcttgtgtgtgggtgcgcgcgctagtatctttccacattaagaaatataccataaaggttacttagacatcactatggctatatatatatatatatatatatatgtaacttagcaccatcgcgcgtgcatcactgcatgtgttaaccgaaaagtttggcgaacacttcaccgacacggtcatttagatctgtcgtctgcattgcacgtcccttagccttaaatcctaggcgggagcattctcgtgtaattgtgcagcctgcgtagcaactcaacatagcgtagtctacccagtttttcaagggtttatcgttagaagattctcccttttcttcctgctcacaaatcttaaagtcatacattgcacgactaaatgcaagcatgcggatcccccgggctgcaggaattcgatatcaagcttatcgataccgtcgactggccattaatctttcccatattagatttcgccaagccatgaaagttcaagaaaggtctttagacgaattacccttcatttctcaaactggcgtcaagggatcctggtatggttttatcgttttatttctggttcttatagcatcgttttggacttctctgttcccattaggcggttcaggagccagcgcagaatcattctttgaaggatacttatcctttccaattttgattgtctgttacgttggacataaactgtatactagaaattggactttgatggtgaaactagaagatatggatcttgataccggcagaaaacaagtagatttgactcttcgtagggaagaaatgaggattgagcgagaaacattagcaaaaagatccttcgtaacaagatttttacatttctggtgttgaagggaaagatatgagctatacagcggaatttccatatcactcagattttgttatctaattttttccttcccacgtccgcgggaatctgtgtatattactgcatctagatatatgttatcttatcttggcgcgtacatttaattttcaacgtattctataagaaattgcgggagtttttttcatgtagatgatactgactgcacgcaaatataggcatgatttataggcatgatttgatggctgtaccgataggaacgctaagagtaacttcagaatcgttatcctggcggaaaaaattcatttgtaaactttaaaaaaaaaagccaatatccccaaaattattaagagcgcctccattattaactaaaatttcactcagcatccacaatgtatcaggtatctactacagatattacatgtggcgaaaaagacaagaacaatgcaatagcgcatcaagaaaaaacacaaagctttcaatcaatgaatcgaaaatgtcattaaaatagtatataaattgaaactaagtcataaagctataaaaagaaaatttatttaaatgcaagatttaaagtaaattcacggccctgcaggcctcagctcttgttttgttctgcaaataacttacccatctttttcaaaactttaggtgcaccctcctttgctagaataagttctatccaatacatcctatttggatctgcttgagcttctttcatcacggatacgaattcattttctgttctcacaattttggacacaactctgtcttccgttgccccgaaactttctggcagttttgagtaattccacataggaatgtcattataactctggttcggaccatgaatttccctctcaaccgtgtaaccatcgttattaatgataaagcagattgggtttatcttctctctaatggctagtcctaattcttggacagtcagttgcaatgatccatctccgataaacaataaatgtctagattctttatctgcaatttggctgcctagagctgcggggaaagtgtatcctatagatccccacaagggttgaccaataaaatgtgatttcgatttcagaaatatagatgaggcaccgaagaaagaagtgccttgttcagccacgatcgtctcattactttgggtcaaattttcgacagcttgccacagtctatcttgtgacaacagcgcgttagaaggtacaaaatcttcttgctttttatctatgtacttgcctttatattcaatttcggacaagtcaagaagagatgatatcagggattcgaagtcgaaattttggattctttcgttgaaaattttaccttcatcgatattcaaggaaatcattttattttcattaagatggtgagtaaatgcacccgtactagaatcggtaagctttacacccaacataagaataaaatcagcagattccacaaattccttcaagtttggctctgacagagtaccgttgtaaatccccaaaaatgagggcaatgcttcatcaacagatgatttaccaaagttcaaagtagtaataggtaacttagtctttgaaataaactgagtaacagtcttctctaggccgaacgatataatttcatggcctgtgattacaattggtttcttggcattcttcagactttcctgtattttgttcagaatctcttgatcagatgtattcgacgtggaattttccttcttaagaggcaaggatggtttttcagccttagcggcagctacatctacaggtaaattgatgtaaaccggctttctttcctttagtaaggcagacaacactctatcaatttcaacagttgcattctcggctgtcaataaagtcctggcagcagtaaccggttcgtgcatcttcataaagtgcttgaaatcaccatcagccaacgtatggtgaacaaacttaccttcgttctgcactttcgaggtaggagatcccacgatctcaacaacaggcaggttctcagcataggagcccgctaagccattaactgcggataattcgccaacaccaaatgtagtcaagaatgccgcagcctttttcgttcttgcgtacccgtcggccatataggaggcatttaactcattagcatttcccacccatttcatatctttgtgtgaaataatttgatctagaaattgcaaattgtagtcacctggtactccgaatatttcttctatacctaattcgtgtaatctgtccaacagatagtcacctactgtatacattttgtttactagtttatgtgtgtttattcgaaactaagttcttggtgttttaaaactaaaaaaaagactaactataaaagtagaatttaagaagtttaagaaatagatttacagaattacaatcaatacctaccgtctttatatacttattagtcaagtaggggaataatttcagggaactggtttcaaccttttttttcagctttttccaaatcagagagagcagaaggtaatagaaggtgtaagaaaatgagatagatacatgcgtgggtcaattgccttgtgtcatcatttactccaggcaggttgcatcactccattgaggttgtgcccgttttttgcctgtttgtgcccctgttctctgtagttgcgctaagagaatggacctatgaactgatggttggtgaagaaaacaatattttggtgctgggattctttttttttctggatgccagcttaaaaagcgggctccattatatttagtggatgccaggaataaactgttcacccagacacctacgatgttatatattctgtgtaacccgccccctattttgggcatgtacgggttacagcagaattaaaaggctaattttttgactaaataaagttaggaaaatcactactattaattatttacgtattctttgaaatggcagtattgataatgataaactcgaactgaaaaagcgtgttttttattcaaaatgattctaactcccttacgtaatcaaggaatctttttgccttggcctccgcgtcattaaacttcttgttgttgacgctaacattcaacgctagtatatattcgtttttttcaggtaagttcttttcaacgggtcttactgatgaggcagtcgcgtctgaacctgttaagaggtcaaatatgtcttcttgaccgtacgtgtcttgcatgttattagctttgggaatttgcatcaagtcataggaaaatttaaatcttggctctcttgggctcaaggtgacaaggtcctcgaaaatagggcgcgccccaccgcggtggagctccagcttttgttccctttagtgagggttaattgcgcgcttggcgtaatcatggtcatagctgtttcctgtgtgaaattgttatccgctcacaattccacacaacatacgagccggaagcataaagtgtaaagcctggggtgcctaatgagtgagctaactcacattaattgcgttgcgctcactgcccgctttccagtcgggaaacctgtcgtgccagctgcattaatgaatcggccaacgcgcggggagaggcggtttgcgtattgggcgctcttccgcttcctcgctcactgactcgctgcgctcggtcgttcggctgcggcgagcggtatcagctcactcaaaggcggtaatacggttatccacagaatcaggggataacgcaggaaagaacatgtgagcaaaaggccagcaaaaggccaggaaccgtaaaaaggccgcgttgctggcgtttttccataggctccgcccccctgacgagcatcacaaaaatcgacgctcaagtcagaggtggcgaaacccgacaggactataaagataccaggcgtttccccctggaagctccctcgtgcgctctcctgttccgaccctgccgcttaccggatacctgtccgcctttctcccttcgggaagcgtggcgctttctcatagctcacgctgtaggtatctcagttcggtgtaggtcgttcgctccaagctgggctgtgtgcacgaaccccccgttcagcccgaccgctgcgccttatccggtaactatcgtcttgagtccaacccggtaagacacgacttatcgccactggcagcagccactggtaacaggattagcagagcgaggtatgtaggcggtgctacagagttcttgaagtggtggcctaactacggctacactagaagaacagtatttggtatctgcgctctgctgaagccagttaccttcggaaaaagagttggtagctcttgatccggcaaacaaaccaccgctggtagcggtggtttttttgtttgcaagcagcagattacgcgcagaaaaaaaggatctcaagaagatcctttgatcttttctacggggtctgacgctcagtggaacgaaaactcacgttaagggattttggtcatgagattatcaaaaaggatcttcacctagatccttttaaattaaaaatgaagttttaaatcaatctaaagtatatatgagtaaacttggtctgacagttaccaatgcttaatcagtgaggcacctatctcagcgatctgtctatttcgttcatccatagttgcctgactccccgtcgtgtagataactacgatacgggagggcttaccatctggccccagtgctgcaatgataccgcgagacccacgctcaccggctccagatttatcagcaataaaccagccagccggaagggccgagcgcagaagtggtcctgcaactttatccgcctccatccagtctattaattgttgccgggaagctagagtaagtagttcgccagttaatagtttgcgcaacgttgttgccattgctacaggcatcgtggtgtcacgctcgtcgtttggtatggcttcattcagctccggttcccaacgatcaaggcgagttacatgatcccccatgttgtgcaaaaaagcggttagctccttcggtcctccgatcgttgtcagaagtaagttggccgcagtgttatcactcatggttatggcagcactgcataattctcttactgtcatgccatccgtaagatgcttttctgtgactggtgagtactcaaccaagtcattctgagaatagtgtatgcggcgaccgagttgctcttgcccggcgtcaatacgggataataccgcgccacatagcagaactttaaaagtgctcatcattggaaaacgttcttcggggcgaaaactctcaaggatcttaccgctgttgagatccagttcgatgtaacccactcgtgcacccaactgatcttcagcatcttttactttcaccagcgtttctgggtgagcaaaaacaggaaggcaaaatgccgcaaaaaagggaataagggcgacacggaaatgttgaatactcatactcttcctttttcaatattattgaagcatttatcagggttattgtctcatgagcggatacatatttgaatgtatttagaaaaataaacaaataggggttccgcgcacatttccccgaaaagtgccacctgaacgaagcatctgtgcttcattttgtagaacaaaaatgcaacgcgagagcgctaatttttcaaacaaagaatctgagctgcatttttacagaacagaaatgcaacgcgaaagcgctattttaccaacgaagaatctgtgcttcatttttgtaaaacaaaaatgcaacgcgagagcgctaatttttcaaacaaagaatctgagctgcatttttacagaacagaaatgcaacgcgagagcgctattttaccaacaaagaatctatacttcttttttgttctacaaaaatgcatcccgagagcgctatttttctaacaaagcatcttagattactttttttctcctttgtgcgctctataatgcagtctcttgataactttttgcactgtaggtccgttaaggttagaagaaggctactttggtgtctattttctcttccataaaaaaagcctgactccacttcccgcgtttactgattactagcgaagctgcgggtgcattttttcaagataaaggcatccccgattatattctataccgatgtggattgcgcatactttgtgaacagaaagtgatagcgttgatgattcttcattggtcagaaaattatgaacggtttcttctattttgtctctatatactacgtataggaaatgtttacattttcgtattgttttcgattcactctatgaatagttcttactacaatttttttgtct

SEQ ID NO: 68 - DNA, 1559 bp, Artificial sequence
  Template
gcattgcggattacgtattctaatgttcagtaccgttcgtataatgtatgctatacgaagttatgcagattgtactgagagtgcaccataccaccttttcaattcatcattttttttttattcttttttttgatttcggtttccttgaaatttttttgattcggtaatctccgaacagaaggaagaacgaaggaaggagcacagacttagattggtatatatacgcatatgtagtgttgaagaaacatgaaattgcccagtattcttaacccaactgcacagaacaaaaacctgcaggaaacgaagataaatcatgtcgaaagctacatataaggaacgtgctgctactcatcctagtcctgttgctgccaagctatttaatatcatgcacgaaaagcaaacaaacttgtgtgcttcattggatgttcgtaccaccaaggaattactggagttagttgaagcattaggtcccaaaatttgtttactaaaaacacatgtggatatcttgactgatttttccatggagggcacagttaagccgctaaaggcattatccgccaagtacaattttttactcttcgaagacagaaaatttgctgacattggtaatacagtcaaattgcagtactctgcgggtgtatacagaatagcagaatgggcagacattacgaatgcacacggtgtggtgggcccaggtattgttagcggtttgaagcaggcggcagaagaagtaacaaaggaacctagaggccttttgatgttagcagaattgtcatgcaagggctccctatctactggagaatatactaagggtactgttgacattgcgaagagcgacaaagattttgttatcggctttattgctcaaagagacatgggtggaagagatgaaggttacgattggttgattatgacacccggtgtgggtttagatgacaagggagacgcattgggtcaacagtatagaaccgtggatgatgtggtctctacaggatctgacattattattgttggaagaggactatttgcaaagggaagggatgctaaggtagagggtgaacgttacagaaaagcaggctgggaagcatatttgagaagatgcggccagcaaaactaaaaaactgtattataagtaaatgcatgtatactaaactcacaaattagagcttcaatttaattatatcagttattaccctatgcggtgtgaaataccgcacagatgcgtaaggagaaaataccgcatcaggaaattgtaaacgttaatattttgttaaaattcgcgttaaatttttgttaaatcagctcattttttaaccaataggccgaaatcggcaaaatcccttataaatcaaaagaatagaccgagatagggttgagtgttgttccagtttggaacaagagtccactattaaagaacgtggactccaacgtcaaagggcgaaaaaccgtctatcagggcgatggcccactacgtgaaccatcaccctaatcaagataacttcgtataatgtatgctatacgaacggtaccagtgatgatacaacgagttagccaaggtg

SEQ ID NO: 69 - DNA, 2237 bp, Artificial sequence
  Template
ttatgtatgctcttctgacttttcgtgtgatgaggctcgtggaaaaaatgaataatttatgaatttgagaacaattttgtgttgttacggtattttactatggaataatcaatcaattgaggattttatgcaaatatcgtttgaatatttttccgaccctttgagtacttttcttcataattgcataatattgtccgctgcccctttttctgttagacggtgtcttgatctacttgctatcgttcaacaccaccttattttctaactattttttttttagctcatttgaatcagcttatggtgatggcacatttttgcataaacctagctgtcctcgttgaacataggaaaaaaaaatatataaacaaggctctttcactctccttgcaatcagatttgggtttgttccctttattttcatatttcttgtcatattcctttctcaattattattttctactcataacctcacgcaaaataacacagtcaaatcaatcaaaatgactgacaaaaaaactcttaaagacttaagaaatcgtagttctgtttacgattcaatggttaaatcacctaatcgtgctatgttgcgtgcaactggtatgcaagatgaagactttgaaaaacctatcgtcggtgtcatttcaacttgggctgaaaacacaccttgtaatatccacttacatgactttggtaaactagccaaagtcggtgttaaggaagctggtgcttggccagttcagttcggaacaatcacggtttctgatggaatcgccatgggaacccaaggaatgcgtttctccttgacatctcgtgatattattgcagattctattgaagcagccatgggaggtcataatgcggatgcttttgtagccattggcggttgtgataaaaacatgcccggttctgttatcgctatggctaacatggatatcccagccatttttgcttacggcggaacaattgcacctggtaatttagacggcaaagatatcgatttagtctctgtctttgaaggtgtcggccattggaaccacggcgatatgaccaaagaagaagttaaagctttggaatgtaatgcttgtcccggtcctggaggctgcggtggtatgtatactgctaacacaatggcgacagctattgaagttttgggacttagccttccgggttcatcttctcacccggctgaatccgcagaaaagaaagcagatattgaagaagctggtcgcgctgttgtcaaaatgctcgaaatgggcttaaaaccttctgacattttaacgcgtgaagcttttgaagatgctattactgtaactatggctctgggaggttcaaccaactcaacccttcacctcttagctattgcccatgctgctaatgtggaattgacacttgatgatttcaatactttccaagaaaaagttcctcatttggctgatttgaaaccttctggtcaatatgtattccaagacctttacaaggtcggaggggtaccagcagttatgaaatatctccttaaaaatggcttccttcatggtgaccgtatcacttgtactggcaaaacagtcgctgaaaatttgaaggcttttgatgatttaacacctggtcaaaaggttattatgccgcttgaaaatcctaaacgtgaagatggtccgctcattattctccatggtaacttggctccagacggtgccgttgccaaagtttctggtgtaaaagtgcgtcgtcatgtcggtcctgctaaggtctttaattctgaagaagaagccattgaagctgtcttgaatgatgatattgttgatggtgatgttgttgtcgtacgttttgtaggaccaaagggcggtcctggtatgcctgaaatgctttccctttcatcaatgattgttggtaaagggcaaggtgaaaaagttgcccttctgacagatggccgcttctcaggtggtacttatggtcttgtcgtgggtcatatcgctcctgaagcacaagatggcggtccaatcgcctacctgcaaacaggagacatagtcactattgaccaagacactaaggaattacactttgatatctccgatgaagagttaaaacatcgtcaagagaccattgaattgccaccgctctattcacgcggtatccttggtaaatatgctcacatcgtttcgtctgcttctaggggagccgtaacagacttttggaagcctgaagaaactggcaaaaaatgagcgatttaatctctaattatt

SEQ ID NO: 70 - DNA, 4420 bp, Artificial Sequence
  PDC1 A-ilvDSm-BUC cassette
ttatgtatgctcttctgacttttcgtgtgatgaggctcgtggaaaaaatgaataatttatgaatttgagaacaattttgtgttgttacggtattttactatggaataatcaatcaattgaggattttatgcaaatatcgtttgaatatttttccgaccctttgagtacttttcttcataattgcataatattgtccgctgcccctttttctgttagacggtgtcttgatctacttgctatcgttcaacaccaccttattttctaactattttttttttagctcatttgaatcagcttatggtgatggcacatttttgcataaacctagctgtcctcgttgaacataggaaaaaaaaatatataaacaaggctctttcactctccttgcaatcagatttgggtttgttccctttattttcatatttcttgtcatattcctttctcaattattattttctactcataacctcacgcaaaataacacagtcaaatcaatcaaaatgactgacaaaaaaactcttaaagacttaagaaatcgtagttctgtttacgattcaatggttaaatcacctaatcgtgctatgttgcgtgcaactggtatgcaagatgaagactttgaaaaacctatcgtcggtgtcatttcaacttgggctgaaaacacaccttgtaatatccacttacatgactttggtaaactagccaaagtcggtgttaaggaagctggtgcttggccagttcagttcggaacaatcacggtttctgatggaatcgccatgggaacccaaggaatgcgtttctccttgacatctcgtgatattattgcagattctattgaagcagccatgggaggtcataatgcggatgcttttgtagccattggcggttgtgataaaaacatgcccggttctgttatcgctatggctaacatggatatcccagccatttttgcttacggcggaacaattgcacctggtaatttagacggcaaagatatcgatttagtctctgtctttgaaggtgtcggccattggaaccacggcgatatgaccaaagaagaagttaaagctttggaatgtaatgcttgtcccggtcctggaggctgcggtggtatgtatactgctaacacaatggcgacagctattgaagttttgggacttagccttccgggttcatcttctcacccggctgaatccgcagaaaagaaagcagatattgaagaagctggtcgcgctgttgtcaaaatgctcgaaatgggcttaaaaccttctgacattttaacgcgtgaagcttttgaagatgctattactgtaactatggctctgggaggttcaaccaactcaacccttcacctcttagctattgcccatgctgctaatgtggaattgacacttgatgatttcaatactttccaagaaaaagttcctcatttggctgatttgaaaccttctggtcaatatgtattccaagacctttacaaggtcggaggggtaccagcagttatgaaatatctccttaaaaatggcttccttcatggtgaccgtatcacttgtactggcaaaacagtcgctgaaaatttgaaggcttttgatgatttaacacctggtcaaaaggttattatgccgcttgaaaatcctaaacgtgaagatggtccgctcattattctccatggtaacttggctccagacggtgccgttgccaaagtttctggtgtaaaagtgcgtcgtcatgtcggtcctgctaaggtctttaattctgaagaagaagccattgaagctgtcttgaatgatgatattgttgatggtgatgttgttgtcgtacgttttgtaggaccaaagggcggtcctggtatgcctgaaatgctttccctttcatcaatgattgttggtaaagggcaaggtgaaaaagttgcccttctgacagatggccgcttctcaggtggtacttatggtcttgtcgtgggtcatatcgctcctgaagcacaagatggcggtccaatcgcctacctgcaaacaggagacatagtcactattgaccaagacactaaggaattacactttgatatctccgatgaagagttaaaacatcgtcaagagaccattgaattgccaccgctctattcacgcggtatccttggtaaatatgctcacatcgtttcgtctgcttctaggggagccgtaacagacttttggaagcctgaagaaactggcaaaaaatgagcgatttaatctctaattattagttaaagttttataagcatttttatgtaacgaaaaataaattggttcatattattactgcactgtcacttaccatggaaagaccagacaagaagttgccgacagtctgttgaattggcctggttaggcttaagtctgggtccgcttctttacaaatttggagaatttctcttaaacgatatgtatattcttttcgttggaaaagatgtcttccaaaaaaaaaaccgatgaattagtggaaccaaggaaaaaaaaagaggtatccttgattaaggaacactgtttaaacagtgtggtttccaaaaccctgaaactgcattagtgtaatagaagactagacacctcgatacaaataatggttactcaattcaaaactgccagcgaattcgactctgcaattgctcaagacaagctagttgtcgtagatttctacgccacttggtgcggtccatgtaaaatgattgctccaatgattgaaaaatgtggctgtggtttcagggtccataaagcttttcaattcatcttttttttttttgttcttttttttgattccggtttctttgaaatttttttgattcggtaatctccgagcagaaggaagaacgaaggaaggagcacagacttagattggtatatatacgcatatgtggtgttgaagaaacatgaaattgcccagtattcttaacccaactgcacagaacaaaaacctgcaggaaacgaagataaatcatgtcgaaagctacatataaggaacgtgctgctactcatcctagtcctgttgctgccaagctatttaatatcatgcacgaaaagcaaacaaacttgtgtgcttcattggatgttcgtaccaccaaggaattactggagttagttgaagcattaggtcccaaaatttgtttactaaaaacacatgtggatatcttgactgatttttccatggagggcacagttaagccgctaaaggcattatccgccaagtacaattttttactcttcgaagacagaaaatttgctgacattggtaatacagtcaaattgcagtactctgcgggtgtatacagaatagcagaatgggcagacattacgaatgcacacggtgtggtgggcccaggtattgttagcggtttgaagcaggcggcggaagaagtaacaaaggaacctagaggccttttgatgttagcagaattgtcatgcaagggctccctagctactggagaatatactaagggtactgttgacattgcgaagagcgacaaagattttgttatcggctttattgctcaaagagacatgggtggaagagatgaaggttacgattggttgattatgacacccggtgtgggtttagatgacaagggagacgcattgggtcaacagtatagaaccgtggatgatgtggtctctacaggatctgacattattattgttggaagaggactatttgcaaagggaagggatgctaaggtagagggtgaacgttacagaaaagcaggctgggaagcatatttgagaagatgcggccagcaaaactaaaaaactgtattataagtaaatgcatgtatactaaactcacaaattagagcttcaatttaattatatcagttattacccgggaatctcggtcgtaatgatttctataatgacgaaaaaaaaaaaattggaaagaaaaagcttcatggccttccactttcccaaacaacacctacggtatctctcaagtcttatggggttccattggtttcaccactggtgctaccttgggtgctgctttcgctgctgaagaaattgatccaaagaagagagttatcttattcattggtgacggttctttgcaattgactgttcaagaaatctccaccatgatcagatggggcttgaagccatacttgttcgtcttgaacaacgatggttacaccattgaaaagttgattcacggtccaaaggctcaatacaacgaaattcaaggttgggaccacctatccttgttgccaactttcggtgctaaggactatgaaacccacagagtcgctaccaccggtgaatgggacaagttgacccaagacaagtctttcaacgacaactctaagatcagaatgattgaaatcatgttgccagtcttcgatgctccacaaaacttggttgaacaagctaagttgactgctgctaccaacgctaagcaataa

SEQ ID NO: 71 - DNA, 3521 bp, Artificial sequence
  Cassette
aaggaaataaagcaaataacaataacaccattattttaattttttttctattactgtcgctaacacctgtatggttgcaaccaggtgagaatccttctgatgcatactttatgcgtttatgcgttttgcgccccttggaaaaaaattgattctcatcgtaaatgcatactacatgcgtttatgggaaaagcctccatatccaaaggtcgcgtttcttttagaaaaactaatacgtaaacctgcattaaggtaagattatatcagaaaatgtgttgcaagaaatgcattatgcaattttttgattatgacaatctctcgaaagaaatttcatatgatgagacttgaataatgcagcggcgcttgctaaaagaacttgtatataagagctgccattctcgatcaatatactgtagtaagtcctttcctctctttcttattacacttatttcacataatcaatctcaaagagaacaacacaatacaataacaagaagaacaaaatgaaagctctggtttatcacggtgaccacaagatctcgcttgaagacaagcccaagcccacccttcaaaagcccacggatgtagtagtacgggttttgaagaccacgatctgcggcacggatctcggcatctacaaaggcaagaatccagaggtcgccgacgggcgcatcctgggccatgaaggggtaggcgtcatcgaggaagtgggcgagagtgtcacgcagttcaagaaaggcgacaaggtcctgatttcctgcgtcacttcttgcggctcgtgcgactactgcaagaagcagctttactcccattgccgcgacggcgggtggatcctgggttacatgatcgatggcgtgcaggccgaatacgtccgcatcccgcatgccgacaacagcctctacaagatcccccagacaattgacgacgaaatcgccgtcctgctgagcgacatcctgcccaccggccacgaaatcggcgtccagtatgggaatgtccagccgggcgatgcggtggctattgtcggcgcgggccccgtcggcatgtccgtactgttgaccgcccagttctactccccctcgaccatcatcgtgatcgacatggacgagaatcgcctccagctcgccaaggagctcggggcaacgcacaccatcaactccggcacggagaacgttgtcgaagccgtgcataggattgcggcagagggagtcgatgttgcgatcgaggcggtgggcataccggcgacttgggacatctgccaggagatcgtcaagcccggcgcgcacatcgccaacgtcggcgtgcatggcgtcaaggttgacttcgagattcagaagctctggatcaagaacctgacgatcaccacgggactggtgaacacgaacacgacgcccatgctgatgaaggtcgcctcgaccgacaagcttccgttgaagaagatgattacccatcgcttcgagctggccgagatcgagcacgcctatcaggtattcctcaatggcgccaaggagaaggcgatgaagatcatcctctcgaacgcaggcgctgcctgagctaattaacataaaactcatgattcaacgtttgtgtatttttttacttttgaaggttatagatgtttaggtaaataattggcatagatatagttttagtataataaatttctgatttggtttaaaatatcaactattttttttcacatatgttcttgtaattacttttctgtcctgtcttccaggttaaagattagcttctaatattttaggtggtttattatttaattttatgctgattaatttatttacttgtttaaacggccggccaatgtggctgtggtttcagggtccataaagcttttcaattcatcttttttttttttgttcttttttttgattccggtttctttgaaatttttttgattcggtaatctccgagcagaaggaagaacgaaggaaggagcacagacttagattggtatatatacgcatatgtggtgttgaagaaacatgaaattgcccagtattcttaacccaactgcacagaacaaaaacctgcaggaaacgaagataaatcatgtcgaaagctacatataaggaacgtgctgctactcatcctagtcctgttgctgccaagctatttaatatcatgcacgaaaagcaaacaaacttgtgtgcttcattggatgttcgtaccaccaaggaattactggagttagttgaagcattaggtcccaaaatttgtttactaaaaacacatgtggatatcttgactgatttttccatggagggcacagttaagccgctaaaggcattatccgccaagtacaattttttactcttcgaagacagaaaatttgctgacattggtaatacagtcaaattgcagtactctgcgggtgtatacagaatagcagaatgggcagacattacgaatgcacacggtgtggtgggcccaggtattgttagcggtttgaagcaggcggcggaagaagtaacaaaggaacctagaggccttttgatgttagcagaattgtcatgcaagggctccctagctactggagaatatactaagggtactgttgacattgcgaagagcgacaaagattttgttatcggctttattgctcaaagagacatgggtggaagagatgaaggttacgattggttgattatgacacccggtgtgggtttagatgacaagggagacgcattgggtcaacagtatagaaccgtggatgatgtggtctctacaggatctgacattattattgttggaagaggactatttgcaaagggaagggatgctaaggtagagggtgaacgttacagaaaagcaggctgggaagcatatttgagaagatgcggccagcaaaactaaaaaactgtattataagtaaatgcatgtatactaaactcacaaattagagcttcaatttaattatatcagttattacccgggaatctcggtcgtaatgatttctataatgacgaaaaaaaaaaaattggaaagaaaaagcttcatggccttctactttcccaacagatgtatacgctatcgtccaagtcttgtggggttccattggtttcacagtcggcgctctattgggtgctactatggccgctgaagaacttgatccaaagaagagagttattttattcattggtgacggttctctacaattgactgttcaagaaatctctaccatgattagatggggtttgaagccatacatttttgtcttgaataacaacggttacaccattgaaaaattgattcacggtcctcatgccgaatataatgaaattcaaggttgggaccacttggccttattgccaacttttggtgctagaaactacgaaacccacagagttgctaccactggtgaatgggaaaagttgactcaagacaaggacttccaagacaactctaagattagaatgattgaagttatgttgccagtctttgatgctccacaaaacttggttaaacaagctcaattgactgccgctactaacgctaaacaataa

SEQ ID NO: 72 - DNA, 2686 bp, Artificial sequence
  Plasmid
tcgcgcgtttcggtgatgacggtgaaaacctctgacacatgcagctcccggagacggtcacagcttgtctgtaagcggatgccgggagcagacaagcccgtcagggcgcgtcagcgggtgttggcgggtgtcggggctggcttaactatgcggcatcagagcagattgtactgagagtgcaccatatgcggtgtgaaataccgcacagatgcgtaaggagaaaataccgcatcaggcgccattcgccattcaggctgcgcaactgttgggaagggcgatcggtgcgggcctcttcgctattacgccagctggcgaaagggggatgtgctgcaaggcgattaagttgggtaacgccagggttttcccagtcacgacgttgtaaaacgacggccagtgaattcgagctcggtacccggggatcctctagagtcgacctgcaggcatgcaagcttggcgtaatcatggtcatagctgtttcctgtgtgaaattgttatccgctcacaattccacacaacatacgagccggaagcataaagtgtaaagcctggggtgcctaatgagtgagctaactcacattaattgcgttgcgctcactgcccgctttccagtcgggaaacctgtcgtgccagctgcattaatgaatcggccaacgcgcggggagaggcggtttgcgtattgggcgctcttccgcttcctcgctcactgactcgctgcgctcggtcgttcggctgcggcgagcggtatcagctcactcaaaggcggtaatacggttatccacagaatcaggggataacgcaggaaagaacatgtgagcaaaaggccagcaaaaggccaggaaccgtaaaaaggccgcgttgctggcgtttttccataggctccgcccccctgacgagcatcacaaaaatcgacgctcaagtcagaggtggcgaaacccgacaggactataaagataccaggcgtttccccctggaagctccctcgtgcgctctcctgttccgaccctgccgcttaccggatacctgtccgcctttctcccttcgggaagcgtggcgctttctcatagctcacgctgtaggtatctcagttcggtgtaggtcgttcgctccaagctgggctgtgtgcacgaaccccccgttcagcccgaccgctgcgccttatccggtaactatcgtcttgagtccaacccggtaagacacgacttatcgccactggcagcagccactggtaacaggattagcagagcgaggtatgtaggcggtgctacagagttcttgaagtggtggcctaactacggctacactagaaggacagtatttggtatctgcgctctgctgaagccagttaccttcggaaaaagagttggtagctcttgatccggcaaacaaaccaccgctggtagcggtggtttttttgtttgcaagcagcagattacgcgcagaaaaaaaggatctcaagaagatcctttgatcttttctacggggtctgacgctcagtggaacgaaaactcacgttaagggattttggtcatgagattatcaaaaaggatcttcacctagatccttttaaattaaaaatgaagttttaaatcaatctaaagtatatatgagtaaacttggtctgacagttaccaatgcttaatcagtgaggcacctatctcagcgatctgtctatttcgttcatccatagttgcctgactccccgtcgtgtagataactacgatacgggagggcttaccatctggccccagtgctgcaatgataccgcgagacccacgctcaccggctccagatttatcagcaataaaccagccagccggaagggccgagcgcagaagtggtcctgcaactttatccgcctccatccagtctattaattgttgccgggaagctagagtaagtagttcgccagttaatagtttgcgcaacgttgttgccattgctacaggcatcgtggtgtcacgctcgtcgtttggtatggcttcattcagctccggttcccaacgatcaaggcgagttacatgatcccccatgttgtgcaaaaaagcggttagctccttcggtcctccgatcgttgtcagaagtaagttggccgcagtgttatcactcatggttatggcagcactgcataattctcttactgtcatgccatccgtaagatgcttttctgtgactggtgagtactcaaccaagtcattctgagaatagtgtatgcggcgaccgagttgctcttgcccggcgtcaatacgggataataccgcgccacatagcagaactttaaaagtgctcatcattggaaaacgttcttcggggcgaaaactctcaaggatcttaccgctgttgagatccagttcgatgtaacccactcgtgcacccaactgatcttcagcatcttttactttcaccagcgtttctgggtgagcaaaaacaggaaggcaaaatgccgcaaaaaagggaataagggcgacacggaaatgttgaatactcatactcttcctttttcaatattattgaagcatttatcagggttattgtctcatgagcggatacatatttgaatgtatttagaaaaataaacaaataggggttccgcgcacatttccccgaaaagtgccacctgacgtctaagaaaccattattatcatgacattaacctataaaaataggcgtatcacgaggccctttcgtc

SEQ ID NO: 73 - DNA, 1685 bp, Artificial sequence
  Cassette
gtattttggtagattcaattctctttccctttccttttccttcgctccccttccttatcagcattgcggattacgtattctaatgttcagataacttcgtatagcatacattatacgaagttatgcagattgtactgagagtgcaccataccacagcttttcaattcaattcatcattttttttttattcttttttttgatttcggtttctttgaaatttttttgattcggtaatctccgaacagaaggaagaacgaaggaaggagcacagacttagattggtatatatacgcatatgtagtgttgaagaaacatgaaattgcccagtattcttaacccaactgcacagaacaaaaacctgcaggaaacgaagataaatcatgtcgaaagctacatataaggaacgtgctgctactcatcctagtcctgttgctgccaagctatttaatatcatgcacgaaaagcaaacaaacttgtgtgcttcattggatgttcgtaccaccaaggaattactggagttagttgaagcattaggtcccaaaatttgtttactaaaaacacatgtggatatcttgactgatttttccatggagggcacagttaagccgctaaaggcattatccgccaagtacaattttttactcttcgaagacagaaaatttgctgacattggtaatacagtcaaattgcagtactctgcgggtgtatacagaatagcagaatgggcagacattacgaatgcacacggtgtggtgggcccaggtattgttagcggtttgaagcaggcggcagaagaagtaacaaaggaacctagaggccttttgatgttagcagaattgtcatgcaagggctccctatctactggagaatatactaagggtactgttgacattgcgaagagcgacaaagattttgttatcggctttattgctcaaagagacatgggtggaagagatgaaggttacgattggttgattatgacacccggtgtgggtttagatgacaagggagacgcattgggtcaacagtatagaaccgtggatgatgtggtctctacaggatctgacattattattgttggaagaggactatttgcaaagggaagggatgctaaggtagagggtgaacgttacagaaaagcaggctgggaagcatatttgagaagatgcggccagcaaaactaaaaaactgtattataagtaaatgcatgtatactaaactcacaaattagagcttcaatttaattatatcagttattaccctatgcggtgtgaaataccgcacagatgcgtaaggagaaaataccgcatcaggaaattgtaaacgttaatattttgttaaaattcgcgttaaatttttgttaaatcagctcattttttaaccaataggccgaaatcggcaaaatcccttataaatcaaaagaatagaccgagatagggttgagtgttgttccagtttggaacaagagtccactattaaagaacgtggactccaacgtcaaagggcgaaaaaccgtctatcagggcgatggcccactacgtgaaccatcaccctaatcaagataacttcgtatagcatacattatacgaagttatccagtgatgatacaacgagttagccaaggtgacactctccccccccctccccctctgatctttcctgttgcctctttttcccccaaccaa

SEQ ID NO: 74 - DNA, 1188 bp, Salinispora arenicola
atggctccgcatcctacccccgcggataaattttcttttggtctttggacggttggctggcaggcccgtgatccgtttggtgatgctacccgccctgaattagatgctgttgaagcggtccatcgccttgcggaattaggtgcctatggcattacctttcatgatgatgatctgatcccttttggtgctgatgctgctacgcgtgatgctcgtttgtcccggtttcgtcgcgctctggatgaaaccggtttggttgttccgatggttaccacgaatctgtttacccatccggtttttaaagatggtggcttgacgagcaatgatcgcgatgtccggcgttatgccctgcgtaaagttttgcgcaccgtcgatcttgctgttgaattaggtgcgcggacgtttgttatgtggggtggccgtgaaggcgccgaatatgatgtcgctaaagatgttcgtgcggcccttgatcgctatcgggaagctgtcgatttgctttgtcagtatacggttgatcaaggctatgatttgcgttttgccattgaaccgaaacctaatgaaccccgcggtgatatcttactgccgaccgtcggccatgcccttgcttttattgccacgttagctcgccctgaactggtcggtttgaatcccgaagttggccatgaacagatggctggtttgaatgttacgcatggtattgcgcaggccctttggcagggtaaattgtttcatctggatttgaatggtcagcgtggcatcaaatatgatcaagatcttgtctttggtcatggcgatttgcttaatgcttttgcgttagttgatttactggaaaatggtggtcctggtggtgccccggcttatgatggtccgcgccattttgattataaaccttctcggacggaagatagcgctggtgtttgggtctctgctggtgctaatatgcgcacctatttgcttttaaaagaacgggctgcggcctttcgtgctgatccggaagtcatcgaagccttggctgcgagccgggttggtgaactggcgacccctacgttggcccccggtgaatcccatgctggcctgttggcggatcgttcggcctttgaagaatatgatgttggtgccgctgcgacccgcggctttgattttgtccggcttaatcaactggctgttgaacatcttctgggcgcccgttaa

SEQ ID NO: 75 - DNA, 1155 bp, Xylanimonas cellulosilytica
atgagcgatattaaatatgcttttggcctttggaccacgggttggcagggcgttgatccctttggtgatgccacccgtcccgctttagatccggcggaaaatatccgcaaactggccgaattgggcgctcatgcgtttacctttcatgataatgatgtttggccgattgatgcgacggatgccgaacgtgccgctgcgatcgaatccgtcaaaaaagcctcggctgaaaccggtcttgtttgtgaaatggtcaccacgaatacgttttcccatccggtctttaaagcgggcgcctttacctcgaatgatcggaatattcgtcgctatggtctgcgtaaagttttgaaacaggtcgatcttggtgccgaattaggcgcttccacgtttgttatgtggggtggccgcgaaggcgtcgaatatgccaattctaaagatttgggcaccgctcatgcgcggtatgccgaaggtattgatacggttgccgcttatatcaaatctaaaggttatgatatgcgggtcgctctggaaccgaaacctaatgaaccgcgtggcgatatttttcttcctaccatcggtcatgccattgctctgatcaatagcttggataatggtgatattgttggcgtcaatcctgaaaccggtcatgaacaaatggccggtttgaattatacgcatggtttagcgctggccttgtatgttggcaaacttttccatatcgatctgaatggtcagaatggccccaaatatgatcaagatctggttttcggtcatggcaatttgttggatgcctttttcaccgtcgatttactggaaaatggttcccctaatggcgaaattgccccctatgtcggctatcgccattttgattataaaccgtctcggaccgaatatacggatggtatctgggaaagcgcggccgctaatatgaaaacgtattctttgcttgctgaagcgagcaaagcctatcgtgccgatgctgaagttcaggcggcctttgaaaaagccggcgtcctggataaatctgctaccttggcggaaggcgaatcttttgaatcttttcttgctgaacctgatgaagatattacggaattaggtaaacgccatgaaggtttggttcatctgcatcaacttgccctgaatcatatcttgggttaa

SEQ ID NO: 76 - DNA, 1963 bp, Artificial Sequence
  D-Xylulose reductase
tctagaccaccctaagtcgtccctatgtcgtatgtttgcctctactacaaagttactagcaaatatccgcagcaacaacagctgccctcttccagcttcttagtgtgttggccgaaaaggcgctttcgggctccagcttctgtcctctgcggctgctgcacataacgcggggacaatgacttctccagcttttattataaaaggagccatctcctccaggtgaaaaattacgatcaacttttactcttttccattgtctcttgtgtatactcactttagtttgtttcaatcacccctaatactcttcacacaattaaaatgactgctaacccttccttggtgttgaacaagatcgacgacatttcgttcgaaacttacgatgccccagaaatctctgaacctaccgatgtcctcgtccaggtcaagaaaaccggtatctgtggttccgacatccacttctacgcccatggtagaatcggtaacttcgttttgaccaagccaatggtcttgggtcacgaatccgccggtactgttgtccaggttggtaagggtgtcacctctcttaaggttggtgacaacgtcgctatcgaaccaggtattccatccagattctccgacgaatacaagagcggtcactacaacttgtgtcctcacatggccttcgccgctactcctaactccaaggaaggcgaaccaaacccaccaggtaccttatgtaagtacttcaagtcgccagaagacttcttggtcaagttgccagaccacgtcagcttggaactcggtgctcttgttgagccattgtctgttggtgtccacgcctccaagttgggttccgttgctttcggcgactacgttgccgtctttggtgctggtcctgttggtcttttggctgctgctgtcgccaagaccttcggtgctaagggtgtcatcgtcgttgacattttcgacaacaagttgaagatggccaaggacattggtgctgctactcacaccttcaactccaagaccggtggttctgaagaattgatcaaggctttcggtggtaacgtgccaaacgtcgttttggaatgtactggtgctgaaccttgtatcaagttgggtgttgacgccattgccccaggtggtcgtttcgttcaagttggtaacgctgctggtccagtcagcttcccaatcaccgttttcgccatgaaggaattgactttgttcggttctttcagatacggattcaacgactacaagactgctgttggaatctttgacactaactaccaaaacggtagagaaaatgctccaattgactttgaacaattgatcacccacagatacaagttcaaggacgctattgaagcctacgacttggtcagagccggtaagggtgctgtcaagtgtctcattgacggccctgagtaagtcaaccgcttggctggcccaaagtgaaccagaaacgaaaatgattatcaaatagctttatagacctttatcgaaatttatgtaaactaatagaaaagacagtgtagaagttatatggttgcatcacgtgagtttcttgaattcttgaaagtgaagtcttggtcggaacaaacaaacaaaaaaatattttcagcaagagttgatttcttttctggagattttggtaattgacagagaacccctttctgctattgccatctaaacatccttgaatagaactttactggatggccgcctagtgttgagtatatattatcaaccaaaatcctgtatatagtctctgaaaaatttgactatcctaacttaacaaaagagcaccataatgcaagctcatagttcttagagacaccaactatacttagccaaacaaaatgtccttggcctctaaagaagcattcagcaagcttccccagaagttgcacaacttcttcatcaagtttacccccagaccgtttgccgaatattcggaaaagccttcgactatagtggatcc

SEQ ID NO: 77 - DNA, 965 bp, Artificial Sequence
  L-Xylulose reductase
gcctcgtccgccatctcccgtctcaccagtcgctgtcaatcaagattcatcacgaaatactccccatcctttgcatcgcccatcatgcctcagcctgtccccaccgccaacagactccttgatctcttcagcttgaagggcaaggtcgtcgtcgtcaccggcgcttccggccctcgaggcatgggaatcgaagctgcccgtggctgcgccgagatgggcgctgacctcgccatcacctactcgtctcgcaaggagggcgcggagaagaacgccgaggaattgaccaaggaatacggcgtcaaagtcaaggtgtacaaggtcaaccagagcgactacaacgatgttgagcgctttgtgaaccaggtcgtgtctgactttggcaagatcgatgcctttattgccaacgccggagccacagctaatagcggagttgttgacggcagcgccagcgattgggaccatgtcatccaggtcgacctgagcggcaccgcatactgcgcaaaggctgttggcgcgcacttcaagaagcagggccacggctcccttgtcatcacagcttcaatgtccggccacgtcgcaaactatccccaggaacagacctcatacaacgtcgccaaggccggttgcatccatctggcgcggtctctggccaacgagtggcgtgattttgcccgcgtcaacagcatttcgcccggttatatcgataccggcctgtccgacttcatcgacgagaagacgcaagagctgtggaggagcatgatccccatgggacgaaacggcgatgccaaggagctcaagggcgcgtatgtatatctggtcagcgacgctagctcgtacacgacgggagccgatattgtgattgacggaggttacactacacgataaagaaataatgtattgttagactataatcaatgtgacgaacaagatttgtgattaagaaaaaaaaaaaaaaaaaaaaaaaa

SEQ ID NO: 78 - DNA, 1430 bp, Artificial Sequence
  L-Arabitol 4-dehydrogenase
cccaagaaggcctggaacagaagatcaaaagcagagaagagagcgtatataagcatacatacactccctctgctccggtattgtggttgatctccaaacgcgtcatccctcccaaccctcaaacgccttgttcgccggagaccgcgcgcattcacagctcgccatgtcgccttccgcagtcgatgacgctcccaaggccacaggggcagccatctcagtcaagcccaacattggcgtcttcacaaatccaaaacatgacctctggattagcgaagctgaacccagcgccgatgccgtcaaatctggcgctgatctgaagcccggcgaggtgaccattgctgtccgcagcactggtatctgtggttcagatgtccatttctggcacgccggctgcattgggcccatgatcgtcgagggcgaccacatcctcggccacgagtctgccggcgaggtcatcgccgtccacccgactgtcagtagcctccaaatcggcgatcgggttgccatcgagcccaacatcatctgcaacgcatgcgagccctgcctgacaggtcgatacaacggctgcgaaaaggtcgagttcctatccacgccgccagtgcccggactgctgcgacgctacgtcaaccacccagccgtttggtgccacaagattggcaacatgtcgtgggagaacggcgcgctgctggagcccctgagcgtggctctggccggcatgcagagggccaaggttcagctcggtgaccccgtgctggtctgcggcgctggtccgattggattggtgtcaatgctgtgcgctgctgccgccggtgcttgcccgcttgtcatcacagacatttcagagagccgtctggcgtttgcaaaggagatctgcccccgcgtcaccacgcaccgcatcgagattggcaagtcggctgaggaaacggccaaaagcatcgtcagctcttttgggggcgtcgagccagccgtgaccctggagtgcaccggtgtggagagcagcattgcagcggccatctgggccagcaagtttggaggaaaggtctttgtgatcggcgtcggcaagaatgaaatcagcattccctttatgagggccagtgtacgcgaggtcgatatccagctgcagtatcgctacagcaacacctggcctcgtgccatccggctcatcgagagcggtgtcatcgatctatccaaatttgtgacgcatcgcttcccgctggaggatgccgtcaaggcatttgagacgtcagcagatcccaagagcggcgccattaaggtcatgattcagagcctggattgagagtgaggtgctaccaggtagaggtagataatagatagatgatgaagatggaaagactgcgggcgcaagaatcgggcggatagggagttggctgtaatggtttgcaaagcataaaaaaaaaaaaaaaaaaaaa

SEQ ID NO: 79 - DNA, 2052 bp, Artificial Sequence
  Aldose reductase
gatccacagacactaattggttctacattattcgtgttcagacacaaaccccagcgttggcggtttctgtctgcgttcctccagcaccttcttgctcaaccccagaaggtgcacactgcagacacacatacatacgagaacctggaacaaatatcggtgtcggtgaccgaaatgtgcaaacccagacacgactaataaacctggcagctccaataccgccgacaacaggtgaggtgaccgatggggtgccaattaatgtctgaaaattggggtatataaatatggcgattctccggagaatttttcagttttcttttcatttctccagtattcttttctatacaactatactacaatgccttctattaagttgaactctggttacgacatgccagccgtcggtttcggctgttggaaagtcgacgtcgacacctgttctgaacagatctaccgtgctatcaagaccggttacagattgttcgacggtgccgaagattacgccaacgaaaagttagttggtgccggtgtcaagaaggccattgacgaaggtatcgtcaagcgtgaagacttgttccttacctccaagttgtggaacaactaccaccacccagacaacgtcgaaaaggccttgaacagaaccctttctgacttgcaagttgactacgttgacttgttcttgatccacttcccagtcaccttcaagttcgttccattagaagaaaagtacccaccaggattctactgtggtaagggtgacaacttcgactacgaagatgttccaattttagagacctggaaggctcttgaaaagttggtcaaggccggtaagatcagatctatcggtgtttctaacttcccaggtgctttgctcttggacttgttgagaggtgctaccatcaagccatctgtcttgcaagttgaacaccacccatacttgcaacaaccaagattgatcgaattcgctcaatcccgtggtattgctgtcaccgcttactcttcgttcggtcctcaatctttcgttgaattgaaccaaggtagagctttgaacacttctccattgttcgagaacgaaactatcaaggctatcgctgctaagcacggtaagtctccagctcaagtcttgttgagatggtcttcccaaagaggcattgccatcattccaaagtccaacactgtcccaagattgttggaaaacaaggacgtcaacagcttcgacttggacgaacaagatttcgctgacattgccaagttggacatcaacttgagattcaacgacccatgggactgggacaagattcctatcttcgtctaagaaggttgctttatagagaggaaataaaacctaatatacattgattgtacatttaaaattgaatattgtagctagcagattcggaaatttaaaatgggaaggtgattctatccgtacgaatgatctctatgtacatacacgttgaagatagcagtacagtagacatcaagtctacagatcattaaacatatcttaaattgtagaaaactataaacttttcaattcaaaccatgtctgccaaggaatcaaatgagatttttttcgcagccaaacttgaatccaaaaataaaaaacgtcattgtctgaaacaactctatcttatctttcacctcatcaattcattgcatatcataaaagcctccgatagcatacaaaactacttctgcatcatatctaaatcatagtgccatattcagtaacaataccggtaagaaacttctatttttttagtctgccttaacgagatgcagatcgatgcaacgtaagatcaaacccctccagttgtacagtcagtcatatagtgaacaccgtacaatatggtatctacgttcaaatagactccaatacagctggtctgcccaagttgagcaactttaatttagagacaaagtcgtctctgttgatgtaggcaccacacattcttctcttgcccgtgaactctgttctggagtggaaacatctccagttgtcaaatatcaaacactgaccaggcttcaactggtagaagatttcgttttcgg

SEQ ID NO: 80 - DNA, 4478 bp, Artificial Sequence
  Ribulokinase
cgtcacactttgctatgccatagcatttttatccataagattagcggatcctacctgacgctttttatcgcaactctctactgtttctccatacccgtttttttggatggagtgaaacgatggcgattgcaattggcctcgattttggcagtgattctgtgcgagctttggcggtggactgcgccagcggtgaagagatcgccaccagcgtagagtggtatccccgttggcaaaaagggcaattttgtgatgccccgaataaccagttccgtcatcatccgcgtgactacattgagtcaatggaagcggcactgaaaaccgtgcttgcagagcttagcgtcgaacagcgcgcagctgtggtcgggattggcgttgacagtaccggctcgacgcccgcaccgattgatgccgacggtaacgtgctggcgctgcgcccggagtttgccgaaaacccgaacgcgatgttcgtattgtggaaagaccacactgcggttgaaagaagcgaagagattacccgtttgtgccacgcgccgggcaatgttgactactcccgctatattggcggtatttattccagcgaatggttctgggcaaaaatcctgcatgtgactcgccaggacagcgccgtggcgcaatctgccgcatcgtggattgagctgtgcgactgggtgccagctctgctttccggtaccacccgcccgcaggatattcgtcgcggacgttgcagcgccgggcataaatctctgtggcacgaaagctggggcggcttgccgccagccagtttctttgatgagctggacccgatcctcaatcgccatttgccttccccgctgttcactgacacctggactgccgatattccggtgggcaccttatgcccggaatgggcgcagcgtctcggcctgcctgaaagcgtggtgatttccggcggcgcgtttgactgccatatgggcgcagttggcgcaggcgcacagcctaacgcactggtaaaagttatcggtacttccacctgcgacattctgattgccgacaaacagagcgttggcgagcgggcagttaaaggtatttgcggtcaggttgatggcagcgtggtgcctggatttatcggtctggaagcaggccaatcggcgtttggtgatatctacgcctggttcggtcgcgtactcagctggccgctggaacagcttgccgcccagcatccggaactgaaagcgcaaatcaacgccagccagaaacaactgcttccggcgctgaccgaagcatgggccaaaaatccgtctctggatcacctgccggtggtgctcgactggtttaacggtcgtcgctcgccaaacgctaaccaacgcctgaaaggggtgattaccgatcttaacctcgctaccgacgctccgctgctgttcggcggtttgattgctgccaccgcctttggcgcacgcgcaatcatggagtgctttaccgatcaggggatcgccgtcaataacgtgatggcgctgggcggcatcgcgcggaaaaaccaagtcattatgcaggcctgctgcgacgtgctgaatcgcccgctgcaaattgttgcctctgaccagtgctgtgcgctcggtgcggcgatttttgctgccgtcgccgcgaaagtgcacgcagacatcccatcagcccagcaaaaaatggccagtgcggtagagaaaaccctgcaaccgcgcagcgaacaggcacaacgctttgaacagctttatcgccgctatcagcaatgggcgatgagcgccgaacaacactatcttccaacttccgccccggcacaggctgcccaggccgttgcgactctataaggacacgataatgacgatttttgataattatgaagtgtggtttgtcattggcagccagcatctgtatggcccggaaaccctgcgtcaggtcacccaacatgccgagcacgttgttaatgcgctgaatacggaagcgaaactgccctgcaaactggtgttgaaaccgctgggcaccacgccggatgaaatcaccgctatttgccgcgacgcgaattacgacgatccgtgcgctggtctggtggtgtggctgcacaccttctccccggccaaaatgtggatcaacggcctgaccatgctcaacaaaccgttgctgcaattccacacccagttcaacgcggcgctgccgtgggacagtatcgatatggactttatgaacctgaaccagactgcacatggcggtcgcgagttcggcttcattggcgcgcgtatgcgtcagcaacatgccgtcgttaccggtcactggcaggataaacaagcccatgagcgtatcggctcctggatgcgtcaggcggtttctaaacaggatacccgtcatctgaaagtctgccgttttggcgataacatgcgtgaagtggcggtcaccgatggtgataaagttgccgcacagatcaagttcggtttctccgtcaatacctgggcggttggcgatctggtgcaggtggtgaactccatcagcgacggcgatgttaacgcgctggtcgatgagtacgaaagctgctacaccatgacgcctgcaacacaaatccacggcgaaaaacgacagaacgtgctggaagcggcgcgtattgagctggggatgaagcgtttcctggaacaaggtggcttccacgcgttcaccaccacctttgaagatttgcacggtctgaaacagcttccaggtctggccgtacagcgtctgatgcagcagggttacggctttgcgggcgaaggcgactggaaaaccgccgccctgcttcgcatcatgaaggtgatgtcaaccggtctgcagggcggcacctcctttatggaggactacacctatcacttcgagaaaggtaatgacttggtgctcggctcccatatgctggaagtctgcccgtcgattgccgtagaagagaaaccgatcctcgacgttcagcatctcggtattggtggtaaggacgatcctgcccgactgatcttcaatacccaaaccggtccagcgattgtcgccagcctgattgatctcggcgatcgttaccgtctgctggttaactgtatcgacacggtgaaaacaccgcactccctgccgaaactgccggtggcgaatgcgctgtggaaagcgcaaccggatctgccaactgcttccgaagcgtggatcctcgctggtggcgcgcaccataccgtcttcagccatgcgctgaacctcaacgatatgcgccagttcgccgagatgcacgacattgaaatcacggtgattgataacgatacccgcctgccagcgtttaaagacgcgctgcgctggaacgaagtgtattacggatttcgtcgctaagtagtcgcatcaggtgtgtaacgcctgatgcggcctgacgcgtcttatcaggcctacacgctgcgattttgtaggccggataagcaaagcgcatccggcattcaacgcctgatgcgacgctggcgcgtcttatcaggcctacgcgttccgattttgtaggccggataagcaaagcgcatccggcattcaacgcctgatgcgacgctggcgcgtcttatcaggcctacacgctgcgattttgtaggccggataagcaaagcgcatccggcacgaaggagtcaacatgttagaagatctcaaacgccaggtattagaggccaacctggcgctgccaaaacataacctggtcacgctcacatggggcaacgtcagcgccgttgatcgcgagcgcggcgtctttgtgatcaaaccttccggcgtcgattacagcatcatgaccgctgacgatatggtcgtggttagcatcgaaaccggtgaagtggttgaaggtgcgaaaaagccctcctccgatacgccaactcaccgactgctctatcaggcattcccgtccattggcggcattgtgcacacacactcgcgccacgccactatctgggcgcaggcgggccagtcgattccagcaaccggcaccacccacgccgactatttctacggcaccattccctgcacccgcaaaatgaccgacgcagaaatcaacggtgaatatgagtgggaaaccggtaacgtcatcgtagaaaccttcgaaaaacagggtatcgatgcagcgcaaatgcccggcgtcctggtccattctcacggcccatttgcatggggcaaaaatgccgaagatgcggtgcataacgccatcgtgctggaagaggtcgcttatatggggatattctgccgtcagttagcgccgcagttaccggatatgcagcaaacgctgctgaataaacactatctgcgtaagcatggcgcgaaggcatattacgggcagtaatgactgtataaaaccacagccaatcaaacgaaaccaggctataatcaagcctggttttttgatggaattacagcgtggcgcaggcaggttttatcttaacccgacactggcgggacaccccgcaagggacagaagtctccttctggctggcgacggacaacgggcc

SEQ ID NO: 81 - DNA, 9037 bp, Artificial Sequence
  Xylulokinase
gaattcataatgtgatagaataatgggtgaagtgtataaagaagaatatataatattactgtgtagaaatatcaatttccctttgtgagttctcataacctcgaggagaagtttttttacccctctccacagatcgatacttatcattaagaaaatgggacaccaaggttacggaaaaatctacccggtctacctaattactctcttggcgcactagttttccgaaaaaaacaggtaaattcttctttagataaagataaatataaaacttcacagccattcactcacacaaactagtcccttagggtgcgtataatgatctgtacatcttatttctatatatcttaccgtgtattttttcttttctcaattcttgttcgcaaataaaaagatattcgtgtttgtggaagaacactagttccgttttgtattcaacctggaaatttacaatagatcttcatcatcgtatgtctaccatgttaatctcccgttaaactgtttcacgttatcaagattatgtcatctattcctgggcgaacataattccttacaaaaacatttgtcattacacaagtgtaaggggtaatgaaaagtaattttgttacaagtacgcaaaattcgtttatttcaagaaacactaaggatcgtcatttccctttctgaccgatgttccttctttttgctatttttttcccgagtcatctcatcgttttgagtttttcctagtccattaaattgtcaccttactctcggaaaaaagaaacgacaaatgctcctagtgccgtttttcgaagcttgaaaaaaaaaattgcaaattatttaattttgctgctaaggagttgaagtaggtgcattccgccttattgatcaccctgttagatttgttgcgatcgttatagtgctagtttgtccattgttgtgtcataaaagatagctttgggagaaaattcatcaaaacaacatatcatcagcgttattacaattcattgtccttcccaagtttttttgacgtataatattatcgctatctgactcattagtacacaaatacagatatacaacctcaaaatcaaaaatgcctagaaacccattgaaaaaggaatattgggcagatgtagttgacggattcaagccggctacttctccagccttcgagaatgaaaaagaatctactacatttgttaccgaactaacttccaaaaccgattctgcatttccattaagtagcaaggattcacctggcataaaccaaaccacaaacgatattacctcttcagatcgcttccgtcgtaatgaagacacagagcaggaagacatcaacaacaccaacctgagtaaagatctatccgtgagacatcttttaactctagctgtcgggggtgcaataggtactggtttatatgtgaatacgggtgctgctttatctacaggtggtccggccagtttagttattgattgggttattatcagtacatgtctttttactgtgattaactctcttggtgagctgtccgctgcttttcccgttgttggtgggttcaatgtttacagtatgcgttttattgagccttcatttgcattcgcagtgaacttaaactatttagcacaatggctagttcttctacccttggaattagtggccgcatctattactataaaatactggaatgataaaattaattccgacgcctgggttgctatcttttatgccaccattgcactggctaatatgttggatgttaagtcatttggtgagaccgaatttgtattgtccatgattaaaatcctctccatcattggctttactatcttaggtattgttttgtcctgtggtggtgggcctcacggcggttacattggtggtaaatactggcatgacccaggcgcttttgtagggcacagctcgggaactcagtttaaaggtttatgttcagtttttgttaccgctgccttttcttattccggtattgaaatgactgctgtctccgctgctgaaagtaaaaatccaagagaaaccattcccaaggcagcaaagagaactttttggctgattaccgcctcttatgtgactatattgactttgattggttgcttggttccatccaatgaccctaggttactaaacggttcaagttcagtggacgctgcctcatctcctctggttatcgcaattgaaaacgggggtattaaaggtctaccatcattaatgaacgccattattttgattgctgttgtttccgtggctaacagtgctgtttatgcatgttcaaggtgtatggtcgccatggctcatattggtaatttaccaaaatttttgaaccgtgttgacaaaaggggtagaccaatgaatgctatcttgttaactttgttttttggtttgctttcctttgtggcagcaagtgataagcaagctgaagtctttacatggttgagtgccttatctggtttatcgacaattttctgctggatggccattaatctttcccatattagatttcgccaagccatgaaagttcaagaaaggtctttagacgaattacccttcatttctcaaactggcgtcaagggatcctggtatggttttatcgttttatttctggttcttatagcatcgttttggacttctctgttcccattaggcggttcaggagccagcgcagaatcattctttgaaggatacttatcctttccaattttgattgtctgttacgttggacataaactgtatactagaaattggactttgatggtgaaactagaagatatggatcttgataccggcagaaaacaagtagatttgactcttcgtagggaagaaatgaggattgagcgagaaacattagcaaaaagatccttcgtaacaagatttttacatttctggtgttgaagggaaagatatgagctatacagcggaatttccatatcactcagattttgttatctaattttttccttcccacgtccgcgggaatctgtgtatattactgcatctagatatatgttatcttatcttggcgcgtacatttaattttcaacgtattctataagaaattgcgggagtttttttcatgtagatgatactgactgcacgcaaatataggcatgatttataggcatgatttgatggctgtaccgataggaacgctaagagtaacttcagaatcgttatcctggcggaaaaaattcatttgtaaactttaaaaaaaaaagccaatatccccaaaattattaagagcgcctccattattaactaaaatttcactcagcatccacaatgtatcaggtatctactacagatattacatgtggcgaaaaagacaagaacaatgcaatagcgcatcaagaaaaaacacaaagctttcaatcaatgaatcgaaaatgtcattaaaatagtatataaattgaaactaagtcataaagctataaaaagaaaatttatttaaatgcaagatttaaagtaaattcacttaagccttggcaacgtgttcaaccaagtcgacaactctggtagagtaaccgtattcgttgtcgtaccaggagaccaacttgacgaactttggagacaattggataccagcggaagcatcgaagatggaagagtgagagtcacccaagaagtcagaggagacaacagcgtcttcggtgtaacccaaaacacccttcaacttaccttcagcggcagccttaacaaccttcttgatttcatcgtaggtggtttccttgttcaacttgacagtcaagtcaacaacggagacatcgacggttgggactctgaaagccataccggtcaacttaccttgcaattctggcaagaccttaccgacagccttagcagcaccggtggaggatgggatgatgttaccggaagcggttctaccacctctccagtccttgtgggatggaccgtcaacagtcttttgagtagcagtcaaagagtggacagtggtcatcaaaccttcttcaataccgaaagcatcgttgataaccttggccaatggagccaaacagttggtggtacaagaagcgttggaaacaatcttcaagtcagaagtgtatttttcttcgttaacacccatgacgaacattggggcggtggaagatggagcagtgataacaaccttcttggcaccagcgtcaatgtgcttttgagcagtgtctaattccttgaaaacaccagtggagtcaatggcgatgtcaacgttggaagaaccccatggcaagttagctgggtctctttcttggtaagtagcaatcttcttaccatcgacaatgatgtgcttgtcatcgtgggaaacttcaccagcgtatctaccgtgagtggagtcgtacttgaacatgtaagcagcgtagtcgttggtgatgaatgggtcgttcaaagcaacaacttcgacgtttggtctagacaaagcaattctcatgaccaatctaccgattctaccgaaaccgttaatagcaactctaaccattttgtttgtttatgtgtgtttattcgaaactaagttcttggtgttttaaaactaaaaaaaagactaactataaaagtagaatttaagaagtttaagaaatagatttacagaattacaatcaatacctaccgtctttatatacttattagtcaagtaggggaataatttcagggaactggtttcaaccttttttttcagctttttccaaatcagagagagcagaaggtaatagaaggtgtaagaaaatgagatagatacatgcgtgggtcaattgccttgtgtcatcatttactccaggcaggttgcatcactccattgaggttgtgcccgttttttgcctgtttgtgcccctgttctctgtagttgcgctaagagaatggacctatgaactgatggttggtgaagaaaacaatattttggtgctgggattctttttttttctggatgccagcttaaaaagcgggctccattatatttagtggatgccaggaataaactgttcacccagacacctacgatgttatatattctgtgtaacccgccccctattttgggcatgtacgggttacagcagaattaaaaggctaattttttgactaaataaagttaggaaaatcactactattaattatttacgtattctttgaaatggcagtattgataatgataaactcgaactgaaaaagcgtgttttttattcaaaatgattctaactcccttacgtaatcaaggaatctttttgccttggcctccgcgtcattaaacttcttgttgttgacgctaacattcaacgctagtatatattcgtttttttcaggtaagttcttttcaacgggtcttactgatgaggcagtcgcgtctgaacctgttaagaggtcaaatatgtcttcttgaccgtacgtgtcttgcatgttattagctttgggaatttgcatcaagtcataggaaaatttaaatcttggctctcttgggctcaaggtgacaaggtcctcgaaaatagggtcaaagtatttcgaatttgtgtccattagtggtgttccgtgtgagaactggtaagcttctttcatgaaagagttcaatgattcactcagtttgtcaaacggaatagaggcgggagcatggaacactaattgctcttcaaattctacaggagtaatctttggcttgtcggcagcttttgtttgagcttgctcggctatttttggtttgagctgtataggtttaatgttcgataaatcgagacgttcgttcttcttgataaattctgttaccttgttaaccgaatcttgtggtattttccctaggtatgctagcacatcaccctttaatagtctaccgttggaaccagatggcgcaatttccttcaaagccttttgtttggatatattgttctcagccagtagtaatgacacggatggtaatagcgtctgttcaagattggcttggctgccgtcaacggtttttattggtgtaactgtggctttttttaaatgttgttgtgttgcttcagtactatctgcggatggcttcttaatttcaatagatttcgcatttgcggtgttggcctcttggggtaactttatagtagctaaatcatcatcaacatcagcaatataagcaataggttcaccaacatcaacatctttagagccttcatctttcaggatcttagctagtttaccatcgtccagtgcttccacatcaatttgagatttatctgtttccacttctaatatcacatcgcccgcgctgaatggttcgccaactttatatttccaagacacaatcccccctttctccatagtaggagacattgcaggcattgaaaatgtctttacagcaagtaatttagctgatgcatgatagttgcatttggttaaatatcttgtacatgattttaaagtggagactttggaaattgcacttagcatttttgaatttttccctcgagatgatttaacaataacctagctctttcaatgctctcttatattctcactggaaagcgctaatttgatttgtctctctcgttgctggtcgctcaccctttcataaattgttttttactcttcatttattgattttactttttgtcattttccgaacggggaacaaaatgatgactacttgctacagtatacgaaacatacaagggcattgtcatgtgcacgcataataacggtgatatatatatatgtatgtatattatgtgtctgtgtttgtgtgtacttgtcagggcatgataaattattcaaacatattttagatgagagtcttttccagttcgcttaaggggacaatcttggaattatagcgatcccaattttcattatccacatcggatatgctttccattacatgccatggaaaattgtcattcagaaatttatcaaaaggaactgcaattttattagagtcatataacaatgaccacatggccttataacaaccaccaagggcacatgagtttggtgtttctagcctaaaattaccctttgtagcaccaatgacttgagcaaacttcttcacaatagcatcgtttttagaagccccacctacaaaaaaagtcctttctgccttttatttaggtagtcccgcagcggagattcatcgtaatcaaacttcacgattgtatcttcgttcagtctctgttgtgagcttgcgtttgaatccgaaagcaggggagatattcttaccctgcaacttaaagcctgtgattctacaatatttttggcatcgtgcctcttgtctttgaacttggccacctctctttcaatcatacccgtttttggattgaagataacccttttgtttatggcttttacgctaggaacgatctcccccagaggaaaatatacacctaattcattttcactactttctgagtcatctagcacagcttgattaaaaagagtccaatcgttagtcttctcataattattttcccgttctttgtttaactcgtctcttatcctctcccttgccaaagaaccattacaataacaaatcatacccatataatggtttggcagagttggatgaatgaaaagatgatagttcggagaggggtgatacttatcggtgaccagaagaactgtagtacttgttcctagggaaacgagaacgtcattcttccgcaggggtaaagaacatatagtggctaaattatccccagtcatgggagagaccttgcagtttgtattgaaaccgtacttctcaataaaatatttacagatggtacccgctatcaaatttttcatgggtgctctcattaatttttgtctgatagttttatccttagaagaactatcaattagatgtagtagctcatcactgaattttctttcacgtatatcataaaggttcataccacaggcatctgcctcctctaattcaacaagatggcccactaagatagaagtcaaaaaattagacactaaagaaatggtctttgttttttcgtaagcttctggttctaattgtgcaattttcagaatttgaggaccagtaaatctaaaatgggctctggaccctgttaattgagccattttttcaggcccacctatgcactcttcaaactcttgacattgctttgcagtactgtggtcttgccaattgggggcggtttgccttgcaaatgctacagagctcacgtagtgcaataaatctttttccggtttcttattcaattgctctaacagagattcggcttgggaggaccagtagacagacccgtgctgctggcaggaccctgagacggccataactttgttcaatggaaatttagcctcgcgatatttcgagagaaccagatctagagcctctaaccacatggctacgggacattcgatagtgtcgccgtgtatatagacacccttctttgtgtgataatgcggaagatccttttcaaattccactgtttctgaatggacaatttttaggtcctggttaatggcgagacatttcagttgttgggtcgaaagatcaaacccaagatagtatgagtctaaagacattgtgttggaaacctctcttgtctgtctctgaattactgaacacaacattaaagtactaatctcatcctccttttgtttttctcgagagggcccccttattcgtccgcctgagattgcattggccgaattgaaaagtgacagttatgcacctcagcggctattccctgcgtcgcttgctgaagattgaggattataggaagtagtaagctggaaatggtaatttgtaaaaagaaaatttctaatactgtgacaatgttattaaatcggggttgtttttgtttggggcggccagcggaataatttgttttcaaggacagcagaagctcagaagaacaaaatctccgtgatcttttaaacttttttccattctgatggaataatggtcttgatcccctaaatatttccttttttattgcaattatgatagaaattaatagtagtctatgctggatgatatatatatctcttttgagcttgcttcaaattttttcccgttataatgatgagtgttttgcttattaagggtctaggacatttctatcagtttctatacca

SEQ ID NO: 82 - DNA, 1217 bp, Artificial Sequence
  L-Ribulose-5-phosphate 4-epimerase
ggatcctcgctggtggcgcgcaccataccgtcttcagccatgcactgaacctcaacgatatgcgccaattcgccggagatgcacgacattgaaatcacggtgattgataacgacacccgcctgccagcgtttaaagacgcgctgcgctggaacggaagtgtattacgggtttcgtcgctaagtagccgcatccggtatgtaacgcctgatgcgacgctgacgcgtcttatctggcctacacgctgcgattttgtaggccggataagcaaagcgcatccggcattcaacgcctgatgcgacgctggcgcgtcttatcaggcctacgcgctgcgattttgtaggccggataagcaaagcgcatccggcattcaacgcctgatgcgacgctggcgcgtcttatcaggcctacacgctgcgattttgtaggccggataagcaaagcgcatccggcacgaaggagtcaacatgttagaagatctcaaacgccaggtattagaagccaacctggcgctgccaaaacacaacctggtcacgctcacatggggcaacgtcagcgccgttgatcgcgagcgcggcgtctttgtgatcaaaccttccggcgtcgattacagcgtcatgaccgctgacgatatggtcgtggttagcatcgaaaccggtgaagtggttgaaggtacgaaaaagccctcctccgacacgccaactcaccggctgctctatcaggcattcccctccattggcggcattgtgcatacgcactcgcgccacgccaccatctgggcgcaggcgggtcagtcgattccagcaaccggcaccacccacgccgactatttctacggcaccattccctgcacccgcaaaatgaccgacgcagaaatcaacggcgaatatgagtgggaaaccggtaacgtcatcgtagaaacctttgaaaaacagggtatcgatgcagcgcaaatgcccggcgttctggtccattcccacggcccgtttgcatggggcaaaaatgccgaagatgcggtgcataacgccatcgtgctggaagaggtcgcttatatggggatattctgccgtcagttagcgccgcagttaccggatatgcagcaaacgctgctggataaacactatctgcgtaagcatggcgcgaaggcatattacgggcagtaatgactgtataaaaccacagccaatcaaacgaaaccaggctatactcaagcctggtt

SEQ ID NO: 83 - DNA, 4199 bp, Artificial Sequence
  L-Arabinose isomerase (araA)
aagcttctcatcaatgatttgaattggagctcgggctggccgtcctattgaattaaaaagccggctctgcccccggctttttttaaaagaaaagattgacagtataatagtcaattactataataaaattgttcgtacaaatatttatttataggttttattttctaattagtacgtatcttttgtatttgaaagcgttttattttatgagaaaggggcagtttacatgcttcagacaaaggattatgaattctggtttgtgacaggaagccagcacctatacggggaagagacgctggaactcgtagatcagcatgctaaaagcatttgtgaggggctcagcgggatttcttccagatataaaatcactcataagcccgtcgtcacttcaccggaaaccattagagagctgttaagagaagcggagtacagtgagacatgtgctggcatcattacatggatgcacacattttcccctgcaaaaatgtggatagaaggcctttcctcttatcaaaaaccgcttatgcatttgcatacccaatataatcgcgatatcccgtggggtacgattgacatggattttatgaacagcaaccaatccgcgcatggcgatcgagagtacggttacatcaactcgagaatggggcttagccgaaaagtcattgccggctattgggatgatgaagaagtgaaaaaagaaatgtcccagtggatggatacggcggctgcattaaatgaaagcagacatattaaggttgccagatttggagataacatgcgtcatgtcgcggtaacggacggagacaaggtgggagcgcatattcaatttggctggcaggttgacggatatggcatcggggatctcgttgaagtgatggatcgcattacggacgacgaggttgacacgctttatgccgagtatgacagactatatgtgatcagtgaggaaacaaaacgtgacgaagcaaaggtagcgtccattaaagaacaggcgaaaattgaacttggattaaccgcttttcttgagcaaggcggatacacagcgtttacgacatcgtttgaagtgctgcacggaatgaaacagctgccgggacttgccgttcagcgcctgatggagaaaggctatgggtttgccggtgaaggagattggaagacagcggcccttgtacggatgatgaaaatcatggctaaaggaaaaagaacttccttcatggaagattacacgtaccattttgaaccgggaaatgaaatgattctgggctctcacatgcttgaagtgtgtccgactgtcgctttggatcagccgaaaatcgaggttcattcgctttcgattggcggcaaagaggaccctgcgcgtttggtatttaacggcatcagcggttctgccattcaagctagcattgttgatattggcgggcgtttccgccttgtgctgaatgaagtcaacggccaggaaattgaaaaagacatgccgaatttaccggttgcccgtgttctctggaagccggagccgtcattgaaaacagcagcggaggcatggattttagccggcggtgcacaccatacctgcctgtcttatgaactgacagcggagcaaatgcttgattgggcggaaatggcgggaatcgaaagtgttctcatttcccgtgatacgacaattcataaactgaaacacgagttaaaatggaacgaggcgctttaccggcttcaaaagtagagggggatgtcacatggcttacacaataggggttgattttggaactttatcaggaagagcagtgctcgttcatgtccaaacaggggaggaacttgcggctgctgtaaaagaatacaggcatgctgtcattgataccgtccttccaaaaacgggtcaaaagctgccgcgtgactgggcgctgcagcattttgctgattacctcgaagtcttggaaacaaccattccgtctttactcgaacagacgggcgttgacccgaaagacattatcgggattggaattgatttcacggcatgtacgatccttcctattgacagcagcgggcagccgttatgcatgctgcctgaatatgaagaggagccgcacagctatgtgaagctctggaagcatcatgcggcccaaaaacatgctgatcggctcaatcaaatcgcggaagaagaaggagaggcttttttacagcggtacggaggaaaaatttcatcagaatggatgattccaaaggtcatgcaaattgccgaggaagcgcctcacatttatgaagcggctgaccggatcatcgaggctgcggactggatcgtgtaccagctgtgcggctcgctcaagcgaagcaattgcaccgcagggtataaagcgatgtggagtgaaaaagcggggtatccgtcagatgatttctttgagaaattaaatccttcaatgaaaacgattacaaaggacaaattgtcaggttctattcattcagtaggagaaaaagccggcagtctgactgaaaaaatggcaaagctgacagggcttctcccgggaacggctgttgcggttgccaatgtggacgctcatgtttcggtaccggcggtcggcattacagagccagggaaaatgctgatgattatgggaacctcgacgtgccatgttctacttggtgaagaggtgcatatcgttccaggaatgtgcggcgttgtggacaacggaattctcccgggctatgcgggatatgaagccgggcagtcctgtgtcggcgatcattttgactggtttgtgaaaacatgtgtcccgccagcttatcaagaggaagcaaaggaaaaaaacattggcgttcatgagctgctgagtgagaaagcaaaccatcaagcgcctggtgaaagcggcttgcttgctttagattggtggaatggaaaccgttcaactcttgttgatgcagatttaacagggatgctgcttggcatgacactgctgacgaagcctgaagagatttatagagcgttagttgaagcgacagcttacggaacccggatgattatcgaaacattcaaagaaagcggtgttccgattgaggaactgttcgcagccggcggaatagctgagaaaaacccgtttgtcatgcagatttatgcggatgtgacaaacatggacattaaaatctctggttcaccgcaagccccagccttaggatctgccattttcggcgcgcttgcagcaggcaaagaaaaaggcggctacgatgatatcaaaaaggcagcggcgaacatgggaaaactgaaagatataacttatacgccaaatgccgaaaacgccgcggtttatgaaaaattgtacgctgaatataaagagctggttcattatttcggaaaagaaaaccatgtcatgaagcgtctgaaaacgatcaaaaatcttcaattttcatctgccgccaaaaagaattgataaagggtgatggagcatgcttgaaacattaaaaaaagaagtgctggctgccaacctgaagcttcaagagcatcagctggtaacctttacgtggggaaatgtcagcggcattcaccgtgaaaaagaaagaattgtcatcaaactagcggagtcgaataccagcgacctgacagccgatgacttggttgttttgaaccttgatggagaggtcgtcgaaggctcgcttaaaccttcttcagatacacctacccatgtttatctatataaagcctttccgaatatcgggggaattgtccatacccattctcaatgggcgacaagctgggcgcaatcgggcagagacatccctccgttaggcacgacccatgctgattattttgacagtgcgattccatgtactcgagaaatgtacgatgaagaaatcattcatgactacgaactgaatacaggaaaagtcatagcggaaacctttcagcatcataattacgaacaggtgccgggtgtgctcgtgaataatcacggaccgttctgctggggcactgacgccttaaatgccattcataacgcagttgtattagaaacgcttgccgaaatggcctatcactccattatgctgaacaaggatgtaaccccaatcaatacagtcctgcatgaaaagcatttttatcgaaaacacggagcaaatgcgtattatggccagtcatgatacgcctgtgtcaccggctggcattctgattgacttggacggtactgtattcagaggaaatgagttgatcgaaggagcaa

SEQ ID NO: 84 - DNA, 1669 bp, Artificial Sequence
  Xylose isomerase
gtaaatggctaaggaatatttcccacaaattcaaaagattaagttcgaaggtaaggattctaagaatccattagccttccactactacgatgctgaaaaggaagtcatgggtaagaaaatgaaggattggttacgtttcgccatggcctggtggcacactctttgcgccgaaggtgctgaccaattcggtggaggtacaaagtctttcccatggaacgaaggtactgatgctattgaaattgccaagcaaaaggttgatgctggtttcgaaatcatgcaaaagcttggtattccatactactgtttccacgatgttgatcttgtttccgaaggtaactctattgaagaatacgaatccaaccttaaggctgtcgttgcttacctcaaggaaaagcaaaaggaaaccggtattaagcttctctggagtactgctaacgtcttcggtcacaagcgttacatgaacggtgcctccactaacccagactttgatgttgtcgcccgtgctattgttcaaattaagaacgccatagacgccggtattgaacttggtgctgaaaactacgtcttctggggtggtcgtgaaggttacatgagtctccttaacactgaccaaaagcgtgaaaaggaacacatggccactatgcttaccatggctcgtgactacgctcgttccaagggattcaagggtactttcctcattgaaccaaagccaatggaaccaaccaagcaccaatacgatgttgacactgaaaccgctattggtttccttaaggcccacaacttagacaaggacttcaaggtcaacattgaagttaaccacgctactcttgctggtcacactttcgaacacgaacttgcctgtgctgttgatgctggtatgctcggttccattgatgctaaccgtggtgactaccaaaacggttgggatactgatcaattcccaattgatcaatacgaactcgtccaagcttggatggaaatcatccgtggtggtggtttcgttactggtggtaccaacttcgatgccaagactcgtcgtaactctactgacctcgaagacatcatcattgcccacgtttctggtatggatgctatggctcgtgctcttgaaaacgctgccaagctcctccaagaatctccatacaccaagatgaagaaggaacgttacgcttccttcgacagtggtattggtaaggactttgaagatggtaagctcaccctcgaacaagtttacgaatacggtaagaagaacggtgaaccaaagcaaacttctggtaagcaagaactctacgaagctattgttgccatgtaccaataagttaatcgtagttaaattggtaaaataattgtaaaatcaataaacttgtcaatcctccaatcaagtttaaaagatcctatctctgtactaattaaatatagtacaaaaaaaaatgtataaacaaaaaaaagtctaaaagacggaagaatttaatttagggaaaaaataaaaataataataaacaatagataaatcctttatattaggaaaatgtcccattgtattattttcatttctactaaaaaagaaagtaaataaaacacaagaggaaattttcccttttttttttttttgtaataaattttatgcaaatataaatataaataaaataataaaaaaaaaaaaaaaaaa

SEQ ID NO: 85 - DNA, 2043 bp, Artificial Sequence
  Transketolase
atgactcaattcactgacattgataagctagccgtctccaccataagaattttggctgtggacaccgtatccaaggccaactcaggtcacccaggtgctccattgggtatggcaccagctgcacacgttctatggagtcaaatgcgcatgaacccaaccaacccagactggatcaacagagatagatttgtcttgtctaacggtcacgcggtcgctttgttgtattctatgctacatttgactggttacgatctgtctattgaagacttgaaacagttcagacagttgggttccagaacaccaggtcatcctgaatttgagttgccaggtgttgaagttactaccggtccattaggtcaaggtatctccaacgctgttggtatggccatggctcaagctaacctggctgccacttacaacaagccgggctttaccttgtctgacaactacacctatgttttcttgggtgacggttgtttgcaagaaggtatttcttcagaagcttcctccttggctggtcatttgaaattgggtaacttgattgccatctacgatgacaacaagatcactatcgatggtgctaccagtatctcattcgatgaagatgttgctaagagatacgaagcctacggttgggaagttttgtacgtagaaaatggtaacgaagatctagccggtattgccaaggctattgctcaagctaagttatccaaggacaaaccaactttgatcaaaatgaccacaaccattggttacggttccttgcatgccggctctcactctgtgcacggtgccccattgaaagcagatgatgttaaacaactaaagagcaaattcggtttcaacccagacaagtcctttgttgttccacaagaagtttacgaccactaccaaaagacaattttaaagccaggtgtcgaagccaacaacaagtggaacaagttgttcagcgaataccaaaagaaattcccagaattaggtgctgaattggctagaagattgagcggccaactacccgcaaattgggaatctaagttgccaacttacaccgccaaggactctgccgtggccactagaaaattatcagaaactgttcttgaggatgtttacaatcaattgccagagttgattggtggttctgccgatttaacaccttctaacttgaccagatggaaggaagcccttgacttccaacctccttcttccggttcaggtaactactctggtagatacattaggtacggtattagagaacacgctatgggtgccataatgaacggtatttcagctttcggtgccaactacaaaccatacggtggtactttcttgaacttcgtttcttatgctgctggtgccgttagattgtccgctttgtctggccacccagttatttgggttgctacacatgactctatcggtgtcggtgaagatggtccaacacatcaacctattgaaactttagcacacttcagatccctaccaaacattcaagtttggagaccagctgatggtaacgaagtttctgccgcctacaagaactctttagaatccaagcatactccaagtatcattgctttgtccagacaaaacttgccacaattggaaggtagctctattgaaagcgcttctaagggtggttacgtactacaagatgttgctaacccagatattattttagtggctactggttccgaagtgtctttgagtgttgaagctgctaagactttggccgcaaagaacatcaaggctcgtgttgtttctctaccagatttcttcacttttgacaaacaacccctagaatacagactatcagtcttaccagacaacgttccaatcatgtctgttgaagttttggctaccacatgttggggcaaatacgctcatcaatccttcggtattgacagatttggtgcctccggtaaggcaccagaagtcttcaagttcttcggtttcaccccagaaggtgttgctgaaagagctcaaaagaccattgcattctataagggtgacaagctaatttctcctttgaaaaaagctttctaa

SEQ ID NO: 86 - DNA, 1008 bp, Artificial Sequence
  Transaldolase
atgtctgaaccagctcaaaagaaacaaaaggttgctaacaactctctagaacaattgaaagcctccggcactgtcgttgttgccgacactggtgatttcggctctattgccaagtttcaacctcaagactccacaactaacccatcattgatcttggctgctgccaagcaaccaacttacgccaagttgatcgatgttgccgtggaatacggtaagaagcatggtaagaccaccgaagaacaagtcgaaaatgctgtggacagattgttagtcgaattcggtaaggagatcttaaagattgttccaggcagagtctccaccgaagttgatgctagattgtcttttgacactcaagctaccattgaaaaggctagacatatcattaaattgtttgaacaagaaggtgtctccaaggaaagagtccttattaaaattgcttccacttgggaaggtattcaagctgccaaagaattggaagaaaaggacggtatccactgtaatttgactctattattctccttcgttcaagcagttgcctgtgccgaggcccaagttactttgatttccccatttgttggtagaattctagactggtacaaatccagcactggtaaagattacaagggtgaagccgacccaggtgttatttccgtcaagaaaatctacaactactacaagaagtacggttacaagactattgttatgggtgcttctttcagaagcactgacgaaatcaaaaacttggctggtgttgactatctaacaatttctccagctttattggacaagttgatgaacagtactgaacctttcccaagagttttggaccctgtctccgctaagaaggaagccggcgacaagatttcttacatcagcgacgaatctaaattcagattcgacttgaatgaagacgctatggccactgaaaaattgtccgaaggtatcagaaaattctctgccgatattgttactctattcgacttgattgaaaagaaagttaccgcttaa

SEQ ID NO: 87 - DNA, 717 bp, Artificial Sequence
  Ribulose-phosphate 3-epimerase
atggtcaaaccaattatagctcccagtatccttgcttctgacttcgccaacttgggttgcgaatgtcataaggtcatcaacgccggcgcagattggttacatatcgatgtcatggacggccattttgttccaaacattactctgggccaaccaattgttacctccctacgtcgttctgtgccacgccctggcgatgctagcaacacagaaaagaagcccactgcgttcttcgattgtcacatgatggttgaaaatcctgaaaaatgggtcgacgattttgctaaatgtggtgctgaccaatttacgttccactacgaggccacacaagaccctttgcatttagttaagttgattaagtctaagggcatcaaagctgcatgcgccatcaaacctggtacttctgttgacgttttatttgaactagctcctcatttggatatggctcttgttatgactgtggaacctgggtttggaggccaaaaattcatggaagacatgatgccaaaagtggaaactttgagagccaagttcccccatttgaatatccaagtcgatggtggtttgggcaaggagaccatcccgaaagccgccaaagccggtgccaacgttattgtcgctggtaccagtgttttcactgcagctgacccgcacgatgttatctccttcatgaaagaagaagtctcgaaggaattgcgttctagagatttgctagattag

SEQ ID NO: 88 - DNA, 777 bp, Artificial Sequence
  Ribose-5-phosphate isomerase
atggctgccggtgtcccaaaaattgatgcgttagaatctttgggcaatcctttggaggatgccaagagagctgcagcatacagagcagttgatgaaaatttaaaatttgatgatcacaaaattattggaattggtagtggtagcacagtggtttatgttgccgaaagaattggacaatatttgcatgaccctaaattttatgaagtagcgtctaaattcatttgcattccaacaggattccaatcaagaaacttgattttggataacaagttgcaattaggctccattgaacagtatcctcgcattgatatagcgtttgacggtgctgatgaagtggatgagaatttacaattaattaaaggtggtggtgcttgtctatttcaagaaaaattggttagtactagtgctaaaaccttcattgtcgttgctgattcaagaaaaaagtcaccaaaacatttaggtaagaactggaggcaaggtgttcccattgaaattgtaccttcctcatacgtgagggtcaagaatgatctattagaacaattgcatgctgaaaaagttgacatcagacaaggaggttctgctaaagcaggtcctgttgtaactgacaataataacttcattatcgatgcggatttcggtgaaatttccgatccaagaaaattgcatagagaaatcaaactgttagtgggcgtggtggaaacaggtttattcatcgacaacgcttcaaaagcctacttcggtaattctgacggtagtgttgaagttaccgaaaagtga

SEQ ID NO: 89 - DNA, 1194 bp, Clavibacter michiganensis
atggcgctcacccccacccgcgaggacaagttctcgttcggactctggaccatcggatacacgggggccgatcccttcggcggccccacccgctccgacctcgacgtggtcgagggcgtcgagcgcatctcggagctgggcgcctacggcctcaccttccacgacgacgacctcttcgcgttcggatccaccgacgccgagcgccagacgcagatcgaccgcctcaagggtgcgctcagcgacaccggcatcgtcgtgccgatggtcaccacgaacctcttctccgcgcccgtcttcaaggacggcggcttcacctcgaacgaccgcgccgtccgccggttcgcgatccgcaaggtgctccgcaacatcgatctcgccgctgagctcggcgcgaagacgttcgtcatgtggggcggccgcgagggcgccgagtacgactccgcgaaggacgtccgcggcgcgctcgagcgctaccgcgaggccgtcaacctgctcggcgactacgtcaccgacaagggctacgacatccgcttcgcgatcgagccgaagcccaacgagccccgcggcgacatcctgctgcccaccctcggccacgcgctcgcgttcatcgagaccctcgagcgccccgagctcgtcggcgtgaaccccgaggtcggccacgagcagatggcgggcctcaacttcaccgccggcatcatgcaggcgctgtaccagggcaagctgttccacatcgacctcaacggccagcgcggcatcaagtacgaccaggacctcgtcttcggccacggcgacctgcagaacgcgttctcgctcgtcgacctgctggagaacggcggcgtgggcggcggccgctcctacgacggcccgcgccacttcgactacaagcccagccgcaccgaggacatcacgggcgtgtgggactccgccgccgcgaacatgcgcatgtacctgctcctcaaggagcgcgcgcaggcgttccgcgccgaccccgaggttcaggaggcgctcgccgccgctaaggtcgccgagatcgacaccccgacgctcaacgagggcgagtcctacgacgacatcctcgcggaccgctcctcgtacgaggacttcgcggccgacgagtacttcgacgcgaagggcttcggcttcgtccgcctcaaccagctggcgctcgagcacctgatgggcgcgcgctcctag

SEQ ID NO: 90 - protein, 397 aa, Clavibacter michiganensis
MALTPTREDKFSFGLWTIGYTGADPFGGPTRSDLDVVEGVERISELGAYGLTFHDDDLFAFGSTDAERQTQIDRLKGALSDTGIVVPMVTTNLFSAPVFKDGGFTSNDRAVRRFAIRKVLRNIDLAAELGAKTFVMWGGREGAEYDSAKDVRGALERYREAVNLLGDYVTDKGYDIRFAIEPKPNEPRGDILLPTLGHALAFIETLERPELVGVNPEVGHEQMAGLNFTAGIMQALYQGKLFHIDLNGQRGIKYDQDLVFGHGDLQNAFSLVDLLENGGVGGGRSYDGPRHFDYKPSRTEDITGVWDSAAANMRMYLLLKERAQAFRADPEVQEALAAAKVAEIDTPTLNEGESYDDILADRSSYEDFAADEYFDAKGFGFVRLNQLALEHLMGARS

SEQ ID NO: 91 - DNA, 1188 bp, Arthrobacter chlorophenolicus
atgactctctcccccaccactgccgacaagttcacctttggcctctggacggtgggctggaccggcgcggacccgttcggtgtagccacccgcgcggcgcttgacccggtggaagccgtccataaactcagcgaactgggcgcctacggcatcactttccacgacaacgacctggttcccttcgatgcccccgcctccgagcgcgaactgatcctcaagaacttccgcgcagccctggcagacaccgggctcaaggtgccgatggtcaccaccaacctcttcagccacccggtcttcaaggacggcggcttcacctccaacgaccgctccgtgcgccggttcgccctgtccaaggtgctccgcaacatcgacctcgccgcagaactcggcgccgaaaccttcgtcatgtggggcggccgcgaaggcagcgaatacgacggctccaaagacctcgctgcagcgctggaccgcatgaaggaaggcgtggacaccgccgccggctacatcaaggacaagggctacaacctgcgcatcgccctcgagcccaagcccaacgaaccccgcggtgacatcttcctgcccaccgtcggacacggcctggcattcatcgcccagctcgaacacggcgacatcgtgggcctgaaccccgaaaccggccacgaacaaatggccggactgaacttcacccacggcatcgcccaggcactctgggcaggcaagctgttccacatcgacctcaacgggcagcgcggcatcaagtacgaccaggacctcgtcttcggccacggcgacctcaccagcgccttcttcaccgtcgacctcctcgaaaacggcttcccgggaggcggaccgaagtacgacggcccccgccacttcgactacaagccctcccgcaccgacggctacgacggcgtctgggaatccgccaaggccaacatggccatgtacctgctgctgaaggaacgggcactggccttccgcgccgaccccgaagtccaggaagccctggcagcgtcaggcgtcttcgaactcggcgaacccaccctcaacgccggcgaaaccaccgccgacctgctcgcggacgccgcatcctttgaagacttcgacgccgacaaggccgccgaacgctccttcgccttcgtccggctcaaccagctcgccatcgaacacctcctcaacgcccgctga

SEQ ID NO: 92 - protein, 395 aa, Arthrobacter chlorophenolicus
MTLSPTTADKFTFGLWTVGWTGADPFGVATRAALDPVEAVHKLSELGAYGITFHDNDLVPFDAPASERELILKNFRAALADTGLKVPMVTTNLFSHPVFKDGGFTSNDRSVRRFALSKVLRNIDLAAELGAETFVMWGGREGSEYDGSKDLAAALDRMKEGVDTAAGYIKDKGYNLRIALEPKPNEPRGDIFLPTVGHGLAFIAQLEHGDIVGLNPETGHEQMAGLNFTHGIAQALWAGKLFHIDLNGQRGIKYDQDLVFGHGDLTSAFFTVDLLENGFPGGGPKYDGPRHFDYKPSRTDGYDGVWESAKANMAMYLLLKERALAFRADPEVQEALAASGVFELGEPTLNAGETTADLLADAASFEDFDADKAAERSFAFVRLNQLAIEHLLNAR

SEQ ID NO: 93 - DNA, 1140 bp, Actinosynnema mirum
gtgaccgacttcagcttcggcctgtggacggttggctggcaggggcgtgacccgttcggggacgccacccggcccgtcctcgacgcgccaacggcggtgcgcaagctcgccgagctgggcgcctggggcgtcaccttccacgacgacgacctgatccccttcggggccggcgccgccgagcgggaccggcgggtctccgcgttccgcggcgcgctcgacgagaccgggctcgtcgtgccgatggtgaccacgaacctgttcacccaccccgtcttcaaggacggcggcttcaccagcaacgaccggtcggtgcgccggttcgcgctgcgcaaggtgctgcgcaacctggagctcgccgccgagctcggcgccaagacgatcgtcctgtggggcggtcgcgagggctccgagacggacgcgggcaaggacgtgcaggccgccctggagcggtaccgcgaggcgctggacacggtcgcgcagcactccgtcgaccagggctacggcttccggttcgcgctggagcccaagcccaacgagccgcgcggcgacatcctgctgccgaccgtcgggcacgcgctcgcgttcatctccaccctccagcaccacgagctggtcggcgtgaaccccgaggtcggccacgagcagatggccaacctgaacttcgtccacggcatcgcgcaggcgctgtggcagaagaagctgttccacatcgacctcaacgggcagaaggggccgcgcttcgaccaggacctggtcttcggccacggcgacctgctctcggcgttcttcctggtcgacctcctggagaacggcggctacgacggcccccgccacttcgactacaagccgctgcgcaccgaggacgtcgacggcgtgtgggacagcgccgccgccaacatgcgcacctacaccctcctcaaggagcgcgcgcaggcctaccgcgccgaccccgaggtgcaggaggcgctgcgggtcagcggcgtcaccgagcaggccgtgcccaccctcggcgagggcgagtcgatcgcggacttcctcgcggccgacgagtcgttcgaccccgacaaggccgccgagcgcgggtacgggttcgtgaagctgtcgcagctggccctcgagcacctcctgggcgcccgctga

SEQ ID NO: 94 - protein, 379 aa, Actinosynnema mirum
MTDFSFGLWTVGWQGRDPFGDATRPVLDAPTAVRKLAELGAWGVTFHDDDLIPFGAGAAERDRRVSAFRGALDETGLVVPMVTTNLFTHPVFKDGGFTSNDRSVRRFALRKVLRNLELAAELGAKTIVLWGGREGSETDAGKDVQAALERYREALDTVAQHSVDQGYGFRFALEPKPNEPRGDILLPTVGHALAFISTLQHHELVGVNPEVGHEQMANLNFVHGIAQALWQKKLFHIDLNGQKGPRFDQDLVFGHGDLLSAFFLVDLLENGGYDGPRHFDYKPLRTEDVDGVWDSAAANMRTYTLLKERAQAYRADPEVQEALRVSGVTEQAVPTLGEGESIADFLAADESFDPDKAAERGYGFVKLSQLALEHLLGAR

SEQ ID NO: 95 - DNA, 1167 bp, Kribbella flavida
atgaccgatgccgacttcatgcccacccgcgaggacaagttctcgttcggtctgtggacggtcggctggcagggcgtcgacgtgttcggcggcgaggtccgcccggtgctcgacccggcgcaggccgtgcacaagctgagcgagctcggcgcctacggcatcacctttcacgacaacgacgtgtttccgttcggcagctcggccgccgaccgcgacgcccacctgaagccgttccgggccgcgctggaggaaaccgggctcaaggtcccgatggtgaccacgaatctgttctcccacccggtcttccgcgacggcggcttcaccaacaacgaccgcgacgtacgccggtacgcgatccgcaagaccgccgaccagctcgacctggccgccgagctcggcgccgagaccttcgtcgcctggggcggccgggaaggcgccgagtccggggccgccaaggacgtgcgggccgcgctcgaccggtacaaggaggccttcgacatcctcggcgcgtacgcggccgagcagggctacgacatccggttcgcgatcgagcccaagccgaacgagccgcgcggcgacattctgctgccgacgatcgggcacgccctggccttcatcgagacgctggagtactccgagcgggtcggtctcaacccggaggtcgggcacgaggagatggccgggctcaactacgcgcacggcatcgcccaggcgctgtggcacggcaagctcttccacgccgacctgaacgggcagaacggtccgcgctacgaccaggacctgcggttcggcgccggcaacgcgcgcggggccttctggacggtcgacgtgctcgagcacggcgggtacgacggtccgcggcacttcgacttcaagccgccgcgcaccgaggacctggacggggtctgggcgtcggccgcgggctgcatgcgcaactacctgatcctgcgcgccaaggtccgcgccttccgcgccgaccccgaggtgcagcaggcactgcgcgacgcccggctcgaccagctcgcccagccgacggtggcggccggcgaaaccgtcgccacgctacgcgccgaggacttcgaccccgacgaggccggacgccgcgggatggccttcgagcagctcgaccagctcgcgatcgagcacctctacggcacgaggtcctga

SEQ ID NO: 96 - protein, 388 aa, Kribbella flavida
MTDADFMPTREDKFSFGLWTVGWQGVDVFGGEVRPVLDPAQAVHKLSELGAYGITFHDNDVFPFGSSAADRDAHLKPFRAALEETGLKVPMVTTNLFSHPVFRDGGFTNNDRDVRRYAIRKTADQLDLAAELGAETFVAWGGREGAESGAAKDVRAALDRYKEAFDILGAYAAEQGYDIRFAIEPKPNEPRGDILLPTIGHALAFIETLEYSERVGLNPEVGHEEMAGLNYAHGIAQALWHGKLFHADLNGQNGPRYDQDLRFGAGNARGAFWTVDVLEHGGYDGPRHFDFKPPRTEDLDGVWASAAGCMRNYLILRAKVRAFRADPEVQQALRDARLDQLAQPTVAAGETVATLRAEDFDPDEAGRRGMAFEQLDQLAIEHLYGTRS

SEQ ID NO: 97 - DNA, 1224 bp, Mycobacterium smegmatis
atgaccgtgttggagtcgaacgtctccacaaccgaaccgctcaccccgaagcgagaggaccgtttctcgttcggcctctggaccatcggctggaacggaaacgatccgttcggcgtcgccacccgcccggcgctcgacgtcgtggaggccgtcgagaaactggccgaactcggcgcgtacgggctgacgttccacgatgacgacctgttcgcgttcggcagttccgacaccgagcggcggcggatggtcgaccggttgacgtcggcgttgtcggccaacggcatggtggtcccgatggtgacgaccaacctgttcacccagcccgtcttcaaggacggcggtttcaccagcaacgaccgcacggtgcggcgtttcgcgctgcgcaaggtgctgcgcaacatcgatttggccatcgaactcggcgccgagaccttcgtgttgtggggcggccgtgagggcagcgaatacgactcggccaaggacgtgcaggccgcgctggcgcgctaccgcgaagcgatggatctgttgtgccagtacgtgatcgaccagggcagcgggttgcgcttcgcgatcgaacccaaacccaacgagccgcgcggcgacatcctgctgcccacggtggggcacgcgctggcattcatcgacaccctggcccgcccggagatggtcggggtgaaccccgagaccggccacgagcagatgtccggcctgaacttcatgcacggcatcgcacaggccctgtacagcggcaagctcttccacatcgacctcaacggtcagcggggcatcaagttcgaccaggacctcgtgttcgggcacggcgacctggccaatgccttcgcgctcgtggatctgctcgaacacggtggtcccgacggcaccccggcgtacgagggtcctcggcacttcgactacaagcccagccgcaccgaggacatcgacggtgtgtgggcctcggcggccgcgaacatgcggatgtacctgctgctcaagcagcgcgccgaggcgttccgcgccgatcccgcggtgcgtgaggcgatggcggcggccaaggtggccgaattgcggcagccgacgctcgcgccgggcgagacgtaccacgacctgttggccgaccgctcggccttcgaggagttcgacagtgaggcctatttcggcggcaagggttgcggtttcgtcgcattgcagcagttggccatcgaacacctgatgggcgcgcgatga

SEQ ID NO: 98 - protein, 407 aa, Mycobacterium smegmatis
MTVLESNVSTTEPLTPKREDRFSFGLWTIGWNGNDPFGVATRPALDVVEAVEKLAELGAYGLTFHDDDLFAFGSSDTERRRMVDRLTSALSANGMVVPMVTTNLFTQPVFKDGGFTSNDRTVRRFALRKVLRNIDLAIELGAETFVLWGGREGSEYDSAKDVQAALARYREAMDLLCQYVIDQGSGLRFAIEPKPNEPRGDILLPTVGHALAFIDTLARPEMVGVNPETGHEQMSGLNFMHGIAQALYSGKLFHIDLNGQRGIKFDQDLVFGHGDLANAFALVDLLEHGGPDGTPAYEGPRHFDYKPSRTEDIDGVWASAAANMRMYLLLKQRAEAFRADPAVREAMAAAKVAELRQPTLAPGETYHDLLADRSAFEEFDSEAYFGGKGCGFVALQQLAIEHLMGAR

SEQ ID NO: 99 - DNA, 1188 bp, Arthrobacter sp.
atgactcttcagccaacccccgccgaccgcttcacttttggattgtggaccgtgggatggaccggcgccgatccgttcggcgtcgccacccgcgagaacctggatccggtggaagctgtgcacaagctggccgagctcggcgcctacggcatcaccttccacgacaacgacctggttcccttcgacgccaccgaggcggaacgtgaacaggtccttgcaggcttccgcacggcgctggaggaaaccgggttgaaggtcccgatggtgaccaccaacctgttcagccacccggtgttcaaggacggcggcttcacctccaacgaccgctcgatccgccgcttcgcgctggccaaggtgctgcacaacatcgatcttgctgccgagatgggcgccgagaccttcgtcaagtggggcggccgcgaaggctccgagtacgacggctccaaggatctggccgcggcgctggaccgcatgcgcgaaggcgtggacaccgctgccggctacatcaaggaaaaaggctacaacctgcgcatcgcgctggagccaaagccgaatgagccgcgcggcgacattttcctgcccaccgtgggccacggactggccttcatcgagcagctggagcacggcgacatcgtcggcctgaacccagaaaccggccacgagcagatggccggcctgaacttcacccacggcatcgcccaggcgctgtgggcaggcaagctgttccatatcgagctcaacggccagcggggcatcaagtacgaccaggacctggtcttcggccacggcgacctggccagcgccttcttcaccgtggacctgctggaaaacggcttcccgaacggcggaccaaagtacgacggcccgcgccacttcgactacaagccatcacgcaccgacggctacgacggggtctgggactcggccaaggccaacatgtccatgtacctgatgctcaaggaacgcgcacaggcattccgcgccgaccccgaggtacaggaggcaatgaagctctcgggcgtgttcgagctgggcgagagcaccctggatgccggcgagagtgcgcagcaactgatggacgatgcggctagcttcgccggcttcgacgccaacgccgcagcgcagcgcaacttcgcattcatccgcctgaaccagctggccatcgagcacctgctgggcgcccgctga

SEQ ID NO: 100 - protein, 395 aa, Arthrobacter sp.
MTLQPTPADRFTFGLWTVGWTGADPFGVATRENLDPVEAVHKLAELGAYGITFHDNDLVPFDATEAEREQVLAGFRTALEETGLKVPMVTTNLFSHPVFKDGGFTSNDRSIRRFALAKVLHNIDLAAEMGAETFVKWGGREGSEYDGSKDLAAALDRMREGVDTAAGYIKEKGYNLRIALEPKPNEPRGDIFLPTVGHGLAFIEQLEHGDIVGLNPETGHEQMAGLNFTHGIAQALWAGKLFHIELNGQRGIKYDQDLVFGHGDLASAFFTVDLLENGFPNGGPKYDGPRHFDYKPSRTDGYDGVWDSAKANMSMYLMLKERAQAFRADPEVQEAMKLSGVFELGESTLDAGESAQQLMDDAASFAGFDANAAAQRNFAFIRLNQLAIEHLLGAR

SEQ ID NO: 101 - DNA, 1212 bp, Actinomyces urogenitalis
atgaacaaataccggctcgaggaggagaccatggttcgcaagcccaccaaggaagacaagttctcattcggtctgtggaccgtcggctggctcgccgccgaccccttcggtgacaagacccgtgccgccctgcgtccctgggagtacaccgagaagctcgccgagctgggcgcctggggcatcaccttccacgacaacgacgtcttccccttcgacgccaccgacgccgagcgtgacgagatcgtccgcaagctcaaggacaccgtggacgccacgggcctgaccatcgagatggtcaccaccaacaccttcacccacccgatcttcaaggacggcggcctgaccaacaacgaccgctcgatccgccgcttcggcctgcgcaagatcctgcgcaacgtcgatctcgccgccgagctgggcgccaagacctttgtcatgtggggtggtcgtgagggcgctgagtacgactcctccaaggacctcaacgcggccttcgaccgctacaaggagggcctggacaccgtcgcccagtacatcaaggacaagggctacgacctcaagatcggcctggagcccaagccgaacgagccccgcggtgacatcttcctgcccaccgtcggccacgccctggccctcattgcccagctggacaacggcgacatcgtgggcctgaaccccgaggtcggccacgagcagatggcgaacctcaactacacccacggcatcgcccaggccctcaaccacggcaagctcttccacatcgacctcaacggccagaagggcctgaagtacgaccaggacctggtcttcggccacggcgacctgctgtccgccttcttcaccgtggacctcatcgtcaacggcttcccgaacggcggcccgcgctacgacggcccgatccacttcgactacaagccctcgcgcaccgatggcatggagggcgtgtgggagtccgctgccgccaacatggagatgtggctgcagctcaaggaaaaggcccaggccttccgcgccgaccccgaggtccaggaggctctcaagctctccggcatctacgagctcggcgagcccaccctggccgagggtgagtccctggaggacttcatcgctgaccgctctgcctacgaggactttgacgctgaggctgccgccgcgcgcgactaccacttcgtcaacctctaccagaaggccgtcatgcacctgatcggctga

SEQ ID NO: 102 - protein, 403 aa, Actinomyces urogenitalis
MNKYRLEEETMVRKPTKEDKFSFGLWTVGWLAADPFGDKTRAALRPWEYTEKLAELGAWGITFHDNDVFPFDATDAERDEIVRKLKDTVDATGLTIEMVTTNTFTHPIFKDGGLTNNDRSIRRFGLRKILRNVDLAAELGAKTFVMWGGREGAEYDSSKDLNAAFDRYKEGLDTVAQYIKDKGYDLKIGLEPKPNEPRGDIFLPTVGHALALIAQLDNGDIVGLNPEVGHEQMANLNYTHGIAQALNHGKLFHIDLNGQKGLKYDQDLVFGHGDLLSAFFTVDLIVNGFPNGGPRYDGPIHFDYKPSRTDGMEGVWESAAANMEMWLQLKEKAQAFRADPEVQEALKLSGIYELGEPTLAEGESLEDFIADRSAYEDFDAEAAAARDYHFVNLYQKAVMHLIG

SEQ ID NO: 103 - DNA, 1164 bp, Streptomyces ambofaciens
atgaactaccagcccactcccgaggacaggttcacgttcggtttgtggacggtcggctggcagggccgggaccccttcggcgacgccacccggcgggcgctggacccggcggagtcggtacggcgcctggccgagctgggcgcgtacggggtcacgttccacgacgacgacctgatcccgttcgggtcgagcgacaccgagcgcgaggagcacgtcaagcggttccggcaggcgttggacgcgacgggcatgaaggtgccgatggcgacgacgaacctgttcacgcacccggtgttcaaggacggtgccttcaccgcgaacgaccgcgacgtgcgccggtacgcgctgcgcaagaccatccgcaacatcgatctcgcggtggagctgggcgcgagcgtgtacgtcgcctggggcggccgggagggtgcggaatccggcgcggccaaggacgtgcgggacgcgctggaccggatgaaggaggccttcgacctgctgggcgagtacgtcaccgagcagggctacgacctgaagttcgcgatcgagcccaagccgaacgagccccgcggcgacatcctgctgccgacggtgggacacgcgctggcgttcatcgagcggctggagcggccggagctctacggcgtgaacccggaggtcggacacgagcagatggcggggctgaacttcccgcacggcatcgcacaggcgctgtgggcgggcaagctgttccacatcgacctcaacggccagtccggtatcaagtacgaccaggacctccggttcggcgcgggtgacctgagggccgctttctggctggtcgacctgctggagcgggccgggtacgcggggccgcggcacttcgacttcaagccgccgcggaccgaggacctcgacggcgtgtgggcgtcggcggccggctgcatgcgcaactacctcatcctcaaggaccgggcggccgccttccgtgccgacccgcaggtgcaggaggcgctcgccgcggcgcgactggacgagctggcccgaccgaccgccgaggacggtctcgcggccctgctggccgacccgaccgcgtacgacaccttcgacgtggacgaggccgccgcccgcggcatggccttcgagcacctcgaccagctcgccatggaccaccttctcggcgctcgctga

SEQ ID NO: 104 - protein, 387 aa, Streptomyces ambofaciens
MNYQPTPEDRFTFGLWTVGWQGRDPFGDATRRALDPAESVRRLAELGAYGVTFHDDDLIPFGSSDTEREEHVKRFRQALDATGMKVPMATTNLFTHPVFKDGAFTANDRDVRRYALRKTIRNIDLAVELGASVYVAWGGREGAESGAAKDVRDALDRMKEAFDLLGEYVTEQGYDLKFAIEPKPNEPRGDILLPTVGHALAFIERLERPELYGVNPEVGHEQMAGLNFPHGIAQALWAGKLFHIDLNGQSGIKYDQDLRFGAGDLRAAFWLVDLLERAGYAGPRHFDFKPPRTEDLDGVWASAAGCMRNYLILKDRAAAFRADPQVQEALAAARLDELARPTAEDGLAALLADPTAYDTFDVDEAAARGMAFEHLDQLAMDHLLGAR

SEQ ID NO: 105 - DNA, 1188 bp, Salinispora arenicola
atggcgccccatcccacccctgccgacaagttctccttcggactctggacggtgggctggcaggcccgggatccgttcggagacgccacccgcccggagttggacgcggtcgaggcggtgcaccggctcgccgagttgggcgcatatggcatcaccttccacgacgacgacctgattccctttggggcggacgccgccacccgcgacgcccgcctgagccggttccgccgggccctcgacgagaccggcctggtggtgccgatggtcaccaccaacctcttcacccatcccgtgttcaaggacggcggcctcaccagtaacgaccgcgatgtccggcggtacgcgttacgcaaggtgctgcgcaccgtcgaccttgccgtggagctgggtgcgcgtaccttcgtgatgtggggtggacgcgagggcgccgagtacgacgtcgccaaggacgtccgcgccgccctcgaccgctaccgcgaggcggtcgacctgctctgccagtacaccgtggaccaggggtacgacctgcgtttcgcgatcgagcccaagcccaacgagccccgcggcgacatcctgctgccgactgtcgggcacgcactcgccttcatcgccaccctggcccgcccggagctggtcggcctgaatccggaggtcggccacgagcagatggctgggctcaacgtcacccacggcatcgcccaggcgctctggcagggcaagctgttccacctcgacctcaacggccagcggggcatcaagtacgaccaagacctggtcttcggccacggtgatctgctcaacgcgttcgccctggttgatctgctcgagaacggtggccccggcggtgcgccggcgtacgacggcccccggcacttcgactacaagccgtcccgcaccgaggacagcgccggggtgtgggtttcggccggggcgaacatgcgtacctatctgttactcaaggaacgggccgcggcgttccgggcggacccggaggtcatcgaggcgctggccgcgagccgggtgggcgagctggccacgccgacgctcgcccctggcgagagccacgccgggctcctcgccgaccgctccgccttcgaggagtacgacgtgggcgccgccgcgacacgtggcttcgacttcgtccggctcaaccaactcgccgtcgagcatctgctcggtgcccgctga

SEQ ID NO: 106 - protein, 395 aa, Salinispora arenicola
MAPHPTPADKFSFGLWTVGWQARDPFGDATRPELDAVEAVHRLAELGAYGITFHDDDLIPFGADAATRDARLSRFRRALDETGLVVPMVTTNLFTHPVFKDGGLTSNDRDVRRYALRKVLRTVDLAVELGARTFVMWGGREGAEYDVAKDVRAALDRYREAVDLLCQYTVDQGYDLRFAIEPKPNEPRGDILLPTVGHALAFIATLARPELVGLNPEVGHEQMAGLNVTHGIAQALWQGKLFHLDLNGQRGIKYDQDLVFGHGDLLNAFALVDLLENGGPGGAPAYDGPRHFDYKPSRTEDSAGVWVSAGANMRTYLLLKERAAAFRADPEVIEALAASRVGELATPTLAPGESHAGLLADRSAFEEYDVGAAATRGFDFVRLNQLAVEHLLGAR

SEQ ID NO: 107 - DNA, 1167 bp, Streptomyces sp.
atgaactaccagcccacccccgaggacaggttcaccttcggcctgtggaccgtcggctggcaggggcgggaccccttcggcgacgccacgcgtcccgccctcgacccggtcgaggcggtgcagcggctggccgaactgggcgcctacggagtgaccttccacgacgacgacctgatccccttcggggcgtccgacaccgagcgcgaggcgcacgtcaagcggttccgtcaggcgctcgacgcgaccggcatgaccgttccgatggccaccaccaacctcttcacccaccccgtcttcaaggacggcgcgttcaccgccaacgaccgcgacgtgcgccgttacgccctgcgcaagaccatccggaacatcgatctcgcggtcgagctgggcgccaaggtctacgtcgcctggggcggccgcgagggcgcggagtccggtgccgccaaggacgtgcgtgcggccctggaccgcatgaaggaggccttcgacctgctcggcgagtacgtcacctcgcagggctacgacatccggttcgccatcgagcccaagccgaacgagccgcgcggcgacatcctgctgcccaccatcggccacgcgctcgccttcatcgagcgcctggagcgccccgagctgtacggtgtcaaccccgaggtgggccacgagcagatggccggcctgaacttcccgcacggcatcgcgcaggctctgtgggcgggcaagctcttccacatcgacctcaacggccagtccggcatcaagtacgaccaggacctgcgcttcggcgccggtgacctgcgcgccgccttctggctggtcgacctgctggagagcgccggctgggagggtccgcgccacttcgacttcaagcccccgcggaccgaggacatcgacggcgtgtgggcctccgcggccgggtgcatgcgcaactacctgatcctgaaggagcgcgccgccgccttccgtgccgacccggaggtccaggaggccctgcgtgccgcccggctcgaccagctcgccgagcccaccgcggccgacggcctgcaggccctgctggccgaccgcaccgcgtacgaggacttcgacgtggacgcggccgccgcgcgcggcatggccttcgagcgcctcgaccagctcgccatggaccacctgctgggcgcccgcggctga

SEQ ID NO: 108 - protein, 388 aa, Streptomyces sp.
MNYQPTPEDRFTFGLWTVGWQGRDPFGDATRPALDPVEAVQRLAELGAYGVTFHDDDLIPFGASDTEREAHVKRFRQALDATGMTVPMATTNLFTHPVFKDGAFTANDRDVRRYALRKTIRNIDLAVELGAKVYVAWGGREGAESGAAKDVRAALDRMKEAFDLLGEYVTSQGYDIRFAIEPKPNEPRGDILLPTIGHALAFIERLERPELYGVNPEVGHEQMAGLNFPHGIAQALWAGKLFHIDLNGQSGIKYDQDLRFGAGDLRAAFWLVDLLESAGWEGPRHFDFKPPRTEDIDGVWASAAGCMRNYLILKERAAAFRADPEVQEALRAARLDQLAEPTAADGLQALLADRTAYEDFDVDAAAARGMAFERLDQLAMDHLLGARG

SEQ ID NO: 109 - DNA, 1164 bp, Meiothermus silvanus
atggcatacgaacccaaacccgagcacaagttcaccttcggcctgtggaccgtgggcaacgtggggcgcgaccccttcggcctgcccacccgcccccccctcgagcccgactacatcgtctacaagctggccgagatcggcgcctacggggtcaacctgcacgacaacgacctcatccccgtcgaggccaccgaggccgagcgcgagcgcatcctcaagcgcttcaagaaggccctgcaggacaccggcttggtggtccccatggcgacgaccaacctcttcggcgaccccgccttcaaggacggcgccttcacctcgcccgacgcgcgggtgcgggcttatgccctccagaagaccatgcgggccatggacctcggcgccgagctcggcgcgaagacctacgtcttctggggcgggcgcgagggggccgaggtggacgccgggggcaacgtgctcgacgccctcgcccactaccgcgaggcgctgaacttcctggccgagtactccgaggaccagggctacggctaccgcttcgccctcgagcccaagcccaacgagccgcggggcgacatctacctgccggtggtgggggcagcgctgggcttcatcgccacgctggacaagccccacctcttcggcctcaaccccgaggtggcccacgagaccatggcgggcctcaacttcgtgcacgcggtggcccaggccatcgacgcgggcaagctcttccacatcgacctcaacgaccagaagatgggccgcttcgaccaggatttgcgcttcggcgccgagaacctcaagacggccttcttcctggtcaagctgctggaggactccggctacgacggcccccgccacttcgacgcccacgccctgcgcaccgaggacgaggcgggggtgtgggagttcgccaagggctgcatgaggacctacctcatcctcaaggagaaggccgagcgcttcggccgcgaccgcgagatccaggacctcatcggggcctacaaggtccaggacgaggcgctcgcccggctcaccgcgaagtacagccgcgagaacgcccgggcgctgaaggggctcgagttcgaccgcgaggcgctggggcggcgggggccgggcctggagcggctggaccaactcacggtggagctgctgctcggggtcaggtga

SEQ ID NO: 110 - protein, 387 aa, Meiothermus silvanus
MAYEPKPEHKFTFGLWTVGNVGRDPFGLPTRPPLEPDYIVYKLAEIGAYGVNLHDNDLIPVEATEAERERILKRFKKALQDTGLVVPMATTNLFGDPAFKDGAFTSPDARVRAYALQKTMRAMDLGAELGAKTYVFWGGREGAEVDAGGNVLDALAHYREALNFLAEYSEDQGYGYRFALEPKPNEPRGDIYLPVVGAALGFIATLDKPHLFGLNPEVAHETMAGLNFVHAVAQAIDAGKLFHIDLNDQKMGRFDQDLRFGAENLKTAFFLVKLLEDSGYDGPRHFDAHALRTEDEAGVWEFAKGCMRTYLILKEKAERFGRDREIQDLIGAYKVQDEALARLTAKYSRENARALKGLEFDREALGRRGPGLERLDQLTVELLLGVR

SEQ ID NO: 111 - DNA, 1185 bp, Actinoplanes sp.
gtgtcgctccaggccacacccgatgacaagttctccttcggtctctggaccgtcggctggcaggcgcgtgacgcgttcggtgacgccacccgtccggtcctcgacccgatcgaggccgtgcacaagctggccgagatcggcgcgtacggcgtcacgttccacgacgacgacctggtgccgttcggcgccgacgccgcgacccgcgacggcatcgtcgccgggttctccaaggcgctcgacgagaccggcctgatcgtcccgatggtcaccaccaacctgttcacccacccggtgttcaaggacggcggcttcaccagcaacgaccgcagcgtccggcggtatgcgatccgcaaggtgctgcgccagatggacctcggcgccgagctgggcgccaagaccctggtgctctggggcggccgcgagggcgccgagtacgactcggccaaggacgtcggcgccgccctcgaccgctaccgcgaggccctcaacctgctcgcgcagtactccgaggaccagggctacggcctgccgttcgccatcgagccgaagccgaacgagccccgcggcgacatcctgctcccgaccgccggccacgccatcgcgttcgtgcaggagctggagcgccccgagctgttcggcatcaaccgggagaccggccacgagcagatgtcgaacctgaacttcacccagggcatcgcccaggcgctgtggcacaagaagctgttccacatcgacctgaacggccagcacggcccgaagttcgaccaggacctggtcttcggtcacggtgacctgctcaacgcgttctccctggtcgacctcttggagaacgggcccgacggcggcccggcctacgacggcccgcggcacttcgactacaagccctcgcgcaccgaggacttcgacggcgtctgggagtcggccaaggacaacatccggatgtacctgctgctcaaggagcgggccaaggcgttccgggccgacccggaggtgcaggcggcgctggccgagtccaaggtcgacgagctgcggaccccgacgctgaacccgggcgagacctacgccgacctgctggccgaccgtagcgcgttcgaggactacgacgccgacgcggtcggggccaagggctacggcttcgtcaagctcaaccagctggcgatcgaccacctgctcggagcgcgctga

SEQ ID NO: 112 - protein, 394 aa, Actinoplanes sp.
MSLQATPDDKFSFGLWTVGWQARDAFGDATRPVLDPIEAVHKLAEIGAYGVTFHDDDLVPFGADAATRDGIVAGFSKALDETGLIVPMVTTNLFTHPVFKDGGFTSNDRSVRRYAIRKVLRQMDLGAELGAKTLVLWGGREGAEYDSAKDVGAALDRYREALNLLAQYSEDQGYGLPFAIEPKPNEPRGDILLPTAGHAIAFVQELERPELFGINRETGHEQMSNLNFTQGIAQALWHKKLFHIDLNGQHGPKFDQDLVFGHGDLLNAFSLVDLLENGPDGGPAYDGPRHFDYKPSRTEDFDGVWESAKDNIRMYLLLKERAKAFRADPEVQAALAESKVDELRTPTLNPGETYADLLADRSAFEDYDADAVGAKGYGFVKLNQLAIDHLLGAR

SEQ ID NO: 113 - DNA, 1167 bp, Mobiluncus curtisii
atgcgtaagccatgcaaagaagataaattttccttcggtatttggacagttggttggcagggtgtggacccgtttggggtagccacacgtgaagcattggatccttgggaatatgccgaaaagctcgccgagctaggtgcctggggtgtgacttttcacgataacgatgtgttcgattttgcagcaagtgaacaacagcgtcaagataccataaagagatttaaagaagcctgcgacggggcaggattagttattgaaatggttacgaccaacacatttactcatcctatttttaaggacggagggttgacgaacaatgaccgggaaattcgtcgcttcggcctcaagaaaattctgaaaaacgttgacttggctgcggaaatgggcgcctcgactttcgttatgtggggaggtcgcgaaggtgccgagtacgattcctccaaggatcttaacgccgcttttgaacggtacaaggaaggcttagatgctgttgcgggctacattaaagaaaaaggctacaacttgcgcatcggactggaacccaagccaaatgaacctcgcggtgacatcttcctgccctcagttggtcatgctctggcattaattgctgagctggaaaatggggacgtcgtgggtctgaacccagaaacaggtcatgaacaaatggctaatctgaactataaccacgctttggcacaagcgctgaatgctggaaagcttttccacattgatttgaacgggcaatctgggctgaaatatgaccaggataaatgcttcggtcacggagacttggcatctgctttcttcacagtggatttgctggtcaatgggttccccggaggcggaaatcgttatgaaggtccaattcattttgattataagccctctcggactgagggatttgaaggtgtttgggcttccgcggcggcgaacatggaaatgtatctaatgcttaaggaaaaagctctcgcattccgcgcggatccacttactaaggaacttatggaagcagcttccgtgttggagctgtgcaaacctaccatgaacgagggtgaaacttacgcggaatttatgaacagccctaccgttaacccggaacaggcatcgcaacgtgaatatcactttgtagagctgtaccaacaggctatgcgtcaccttgtgggatag

SEQ ID NO: 114 - protein, 388 aa, Mobiluncus curtisii
MRKPCKEDKFSFGIWTVGWQGVDPFGVATREALDPWEYAEKLAELGAWGVTFHDNDVFDFAASEQQRQDTIKRFKEACDGAGLVIEMVTTNTFTHPIFKDGGLTNNDREIRRFGLKKILKNVDLAAEMGASTFVMWGGREGAEYDSSKDLNAAFERYKEGLDAVAGYIKEKGYNLRIGLEPKPNEPRGDIFLPSVGHALALIAELENGDVVGLNPETGHEQMANLNYNHALAQALNAGKLFHIDLNGQSGLKYDQDKCFGHGDLASAFFTVDLLVNGFPGGGNRYEGPIHFDYKPSRTEGFEGVWASAAANMEMYLMLKEKALAFRADPLTKELMEAASVLELCKPTMNEGETYAEFMNSPTVNPEQASQREYHFVELYQQAMRHLVG

SEQ ID NO: 115 - DNA, 1161 bp, Herpetosiphon aurantiacus
atgtacgacgcacagcctgcccacaaatttacgtttggcctttggacggtcggcaatgttggccgtgatccctttggcgagccagttcgtaagccgctgagtcctcctgagattgtccatttactggcagaagttggcgcttggggcgtaaacttccacgataacgatttaattccaattgatgcaactcccagcgaacgcgactcaattatcaaggcctttcgtggcgctttagctgaaaccggtctcgttgtgccaatggcaactaccaacttattcagtcatccagcttttaaagatggcgcgtttaccagcaatgatccagcagtacgcgcctatgcgctgcaaaaaaccatggccgcgatggatttgggagccgaatttggggccacgacctatgtattttggggtggtcgcgaaggcagcgaaagcgatgccgccaaaaatccgcttgaaggcttgaagtggtttcgcgaggcgctcaactttttgtgtgaatatagcttggcccaaggctataactatcgctttgccttggaagcgaagcccaacgaaccacgcggcgacatctttttgcccaccaccggagccatgttgggctttatcgaaaccctcgatcattcagcaatggttggggttaaccctgaagtagcccacgaaaccatggcgggcttaaattttgcccatgctgtggcccaagcgcttgatgctggcaaacttttccacatcgacctcaacgatcaagccagtggtcgctatgatcaagatttccgctttgcagcgcataactacaagcaaaatttcttcttggtcaagttgctcgaagatgttggctatgatggcccacgccacttcgatgcccatgcctaccgctcagaagatttgcaaggggtcaaagattttgcccgtggctgtattcgcagctatctgattttggccgaaaaagcccgccgcttcaacgctgatgctgaaattcaaggtttgttggccgaattgaaaacagttgagccagcagtggcggcgttggctggtagctattcgccagaacgagttgccgcgctcaaggcgcatgaatttgatcggacggggctgggtgcacgcggtttgggctacgaaaagcttgatcaattgacatttgaattattgatgggtgttcgttaa

SEQ ID NO: 116 - protein, 386 aa, Herpetosiphon aurantiacus
MYDAQPAHKFTFGLWTVGNVGRDPFGEPVRKPLSPPEIVHLLAEVGAWGVNFHDNDLIPIDATPSERDSIIKAFRGALAETGLVVPMATTNLFSHPAFKDGAFTSNDPAVRAYALQKTMAAMDLGAEFGATTYVFWGGREGSESDAAKNPLEGLKWFREALNFLCEYSLAQGYNYRFALEAKPNEPRGDIFLPTTGAMLGFIETLDHSAMVGVNPEVAHETMAGLNFAHAVAQALDAGKLFHIDLNDQASGRYDQDFRFAAHNYKQNFFLVKLLEDVGYDGPRHFDAHAYRSEDLQGVKDFARGCIRSYLILAEKARRFNADAEIQGLLAELKTVEPAVAALAGSYSPERVAALKAHEFDRTGLGARGLGYEKLDQLTFELLMGVR

SEQ ID NO: 117 - DNA, 1224 bp, Acidothermus cellulolyticus
atgtcactcaccactgcatcgtcgaaaactatcgaagttgccacgccgtcgaaggaagaccgtttcagctttggtctgtggaccgtcggctggcaggcgcgtgatcccttcggtgaagcgacacgtccgccgctggatccggtggaggctgttcacaagctcgccgaattaggcgcctacggggtcaccttccatgacgacgacctcgttccgttcggcagcagcgatgcggagcgcgctcggcttatcgaccgtttcaagaaggcgcttgccgacaccggcctggtcgtcccgatgatgacgacgaatctcttcacccatccgatcttcaaggatggtgcgttcaccgccaatgaccggtccattcggcggtatgcgatccgtaaggtgatgcgcaatctggatctggcggccgaactcggcgcccgtacgtacgttttctggggtggccgcgagggaagcgaaatcgacgccgcaaaggacattcgtgctgcgcttgaccggtaccgcgaggcgattgacaccctcgcgcaatacgtcaaagaccaaggctacggcatccggttcgccctcgaaccgaaacccaatgagccgcggggtgatattttcctcccgacgatcgggcatgcgctcgcgttcatcaactccctggagcattcggacatcgtcgggctgaatcctgaagtcggtcacgagcagatgtccaatttgaatttcgtgcacgggatcgcacaggccctctggcacgggaaactcttccacatcgacctcaacggccagcacgggccgaagtacgaccaggacttggtcttcggtcacggtgacctgctcagcgcgttcttcctcgtcgacctgctggagaacggctttcccggcggcggcccggtgtacgacggtccgcggcacttcgactacaagccgatgcgcacggaggacatcgacggcgtctgggcgtccgccgcggcgaacatgcgcacgtacctcctcctcaagcagcgggcaaaggcgtttcgagcggatccggaggtgcaggccgcactcaccgcaagtcgtgttcccgagttggccgtccccaccctcggcgagggcgagtcgtacgccgacctgctggccgaccggtccgcgtgggaggaattcgacgtcgatcgagccgccaaccaaggctacgggtacgcccgtctcgatcagctcgccatcgagcacctcctcggcgcacgcggctga

SEQ ID NO: 118 - protein, 407 aa, Acidothermus cellulolyticus
MSLTTASSKTIEVATPSKEDRFSFGLWTVGWQARDPFGEATRPPLDPVEAVHKLAELGAYGVTFHDDDLVPFGSSDAERARLIDRFKKALADTGLVVPMMTTNLFTHPIFKDGAFTANDRSIRRYAIRKVMRNLDLAAELGARTYVFWGGREGSEIDAAKDIRAALDRYREAIDTLAQYVKDQGYGIRFALEPKPNEPRGDIFLPTIGHALAFINSLEHSDIVGLNPEVGHEQMSNLNFVHGIAQALWHGKLFHIDLNGQHGPKYDQDLVFGHGDLLSAFFLVDLLENGFPGGGPVYDGPRHFDYKPMRTEDIDGVWASAAANMRTYLLLKQRAKAFRADPEVQAALTASRVPELAVPTLGEGESYADLLADRSAWEEFDVDRAANQGYGYARLDQLAIEHLLGARG

SEQ ID NO: 119 - DNA, 1164 bp, Streptomyces coelicolor
atgaactaccagcccactcccgaggacaggttcacgttcggtttgtggacggtcggctggcagggccgtgacccgttcggtgacgccaccaggcaggccctggaccccgccgagtcggtacggcgtctgtccgagctgggtgcgtacggcgtcacgttccacgacgacgacctgatccccttcgggtcgagcgacacggagcgggagtcgcacatcaagcggttccggcaggcgctggacgcgaccggcatgaaggtgccgatggcgacgacgaacctgttcacgcacccggtgttcaaagacggcgccttcacggcgaacgaccgggacgtgcggcggtacgcgctgcgcaagacgatccgcaacatcgacctcgcggtcgagctgggcgcgagcgtctacgtggcctggggcggccgggagggtgcggagtccggcgcggccaaggacgtgcgggacgcgctcgaccggatgaaggaggccttcgacctgctgggcgagtacgtcaccgagcagggctacgacctgaagttcgcgatcgagccgaagcccaacgagccgcgcggtgacatcctgctcccgacggtcggccacgccctcgccttcatcgagcgcctcgagcggccggagctgtacggcgtgaacccggaggtcggccacgagcagatggccggcctgaacttcccccacggcatcgcccaggcgctgtgggcgggcaagctcttccacatcgacctcaacggccagtcgggcatcaagtacgaccaggacctgaggttcggcgcgggcgacctgcgggccgcgttctggctcgtcgacctgctggagcgggccgggtacgcgggtccgcggcacttcgacttcaagccgccgcggaccgaggacttcgacggcgtgtgggcgtcggccgccggctgcatgcgcaactacctgatcctcaaggaccgggcggcggcattccgcgccgacccgcaggtgcaggaggcgctggccgcggcccggctggacgaactggcccgcccgaccgccgaggacggtctcgccgccctgctggccgaccggagcgcctacgacaccttcgacgtggacgcggccgccgcgcgaggcatggcgttcgagcacctcgaccagctcgccatggaccacctcctcggcgcccgctga

SEQ ID NO: 120 - protein, 387 aa, Streptomyces coelicolor
MNYQPTPEDRFTFGLWTVGWQGRDPFGDATRQALDPAESVRRLSELGAYGVTFHDDDLIPFGSSDTERESHIKRFRQALDATGMKVPMATTNLFTHPVFKDGAFTANDRDVRRYALRKTIRNIDLAVELGASVYVAWGGREGAESGAAKDVRDALDRMKEAFDLLGEYVTEQGYDLKFAIEPKPNEPRGDILLPTVGHALAFIERLERPELYGVNPEVGHEQMAGLNFPHGIAQALWAGKLFHIDLNGQSGIKYDQDLRFGAGDLRAAFWLVDLLERAGYAGPRHFDFKPPRTEDFDGVWASAAGCMRNYLILKDRAAAFRADPQVQEALAAARLDELARPTAEDGLAALLADRSAYDTFDVDAAAARGMAFEHLDQLAMDHLLGAR

SEQ ID NO: 121 - DNA, 1167 bp, Streptomyces avermitilis
atgaactaccagcccacccccgaggacaggttcaccttcggcctgtggaccgtcggctggcagggaagggacccgttcggcgacgccacccggcgcgccctggacccggtcgagacggtgcagcgcctcgccgggctcggtgcccacggagtgaccttccacgacgacgacctgatccccttcgggtcctcggacaccgagcgcgagtcgcacatcaagcgcttccggcaggccctcgacgccaccggcatggccgtgccgatggccaccaccaacctcttcacgcaccccgtcttcaaggacggggcgttcaccgccaacgaccgggacgtccgccgttacgccctgcgcaagacgatccgcaacatcgacctcgcggccgagctgggggcgaagacgtacgtcgcctggggcggccgggagggtgccgagtccggcgccgccaaggacgtacgcgtcgcactcgaccggatgaaggaggccttcgacctcctcggcgagtacgtcaccgcccagggctacgacctgcgtttcgccatcgagcccaagccgaacgagccgcgcggcgacatcctgctgccgaccgtcggccacgcgctggcgttcatcgagcgcctggaacgcccggagctgtacggcgtcaaccccgaggtgggtcacgagcagatggccgggctgaacttcccgcacggcatcgcccaggccctgtgggcgggcaagctcttccacatcgacctcaacggccagtccggcatcaagtacgaccaggacctgcgcttcggggcgggcgatctgcgcgccgccttctggctggtcgaccttctggagagcgccggctacgagggcccgaagcacttcgacttcaagccgccgcggacggaggacctcgacggcgtgtgggcctcggccgcgggctgcatgcgcaactacctcatcctcaaggagcgtacggccgccttccgcgccgaccccgaggtccaggaggcgctgcgcgccgcgcggctggacgagctggcgcagcccaccgccggggacggtctgacggcgctgctcgccgaccgtacggcgttcgaggacttcgacgtggaggcggccgccgcgcgggggatggccttcgagcagttggaccagctggcgatggaccacctgctgggggcgcgtggctga

SEQ ID NO: 122 - protein, 388 aa, Streptomyces avermitilis
MNYQPTPEDRFTFGLWTVGWQGRDPFGDATRRALDPVETVQRLAGLGAHGVTFHDDDLIPFGSSDTERESHIKRFRQALDATGMAVPMATTNLFTHPVFKDGAFTANDRDVRRYALRKTIRNIDLAAELGAKTYVAWGGREGAESGAAKDVRVALDRMKEAFDLLGEYVTAQGYDLRFAIEPKPNEPRGDILLPTVGHALAFIERLERPELYGVNPEVGHEQMAGLNFPHGIAQALWAGKLFHIDLNGQSGIKYDQDLRFGAGDLRAAFWLVDLLESAGYEGPKHFDFKPPRTEDLDGVWASAAGCMRNYLILKERTAAFRADPEVQEALRAARLDELAQPTAGDGLTALLADRTAFEDFDVEAAAARGMAFEQLDQLAMDHLLGARG

SEQ ID NO: 123 - DNA, 1158 bp, Nocardiopsis dassonvillei
atgagcagctaccagcccgtgcccgcggacaggttcaccttcggtctgtggaccgtggggtggcgcggggtgaacaccttcggcgaccccgtccgcccggcgctcgacccggtggacgccgtccgccgcctcgccgacctcggcgcgcacgggatcaccttccacgacgacgacctcatcccgcccggcagctccgacaccgagcgcgaggacatcctcaagcggttccgcgcggccctggacgagaccgggctcaaggtgccgatggcgaccaccaacctgttctcggacccggtgttccgcgacggcgggttcacctccaacagccgcgacgtgcgccggtacgccatccgcaaggtcatccgcaacatcgagctggccgtgtcgctgggcgccgagacctacgtgtgctggggaggcatggacggcgccgagaccgaggcgggcaagaacgaccacgccgccctggaccggctgcgcgaggccttcgacatcctgtgcggctacgtgcgcgagcagggccacgacctgcgcttcgccctggagcccaagcccaacgagccgcgcggcgacatcctgctgcccacggtggggcacgccctggccttcatcaacgagctggagcaccccgagatggtgggggtcaacccggaggtcggccacgagcagatggccgggctgaacttcgcgcacggcgtcgcgcaggccctgtgggcgggcaagctcttccacatcgacctcaacggccagcgcgggatcaagtacgaccaggacctgcgcttcggctcgggcgacgtcaaggaggcgttcttcctggtggacctgctggagagcgcgggctacgacggcccgctgcacttcgacttcaagacgccgcgcaccgaggacatgagcggcgtgtgggagtcggccgcggcctgcatgcgcaactacctcatcctcaaggagaaggccagggcgttccgcgccgaccccgaggtggtggagtcgctcgcggcctcgcgcgtgcccgagctgtcccagtccacgctgggcgagggcgagtccctgtccgacctgctggccgaggagatcgacctggccgaggtcggtgagcggggctaccacttcgagcgcctggaccagctcgccatggagcacctgttcggcctgcgctga

SEQ ID NO: 124 - protein, 385 aa, Nocardiopsis dassonvillei
MSSYQPVPADRFTFGLWTVGWRGVNTFGDPVRPALDPVDAVRRLADLGAHGITFHDDDLIPPGSSDTEREDILKRFRAALDETGLKVPMATTNLFSDPVFRDGGFTSNSRDVRRYAIRKVIRNIELAVSLGAETYVCWGGMDGAETEAGKNDHAALDRLREAFDILCGYVREQGHDLRFALEPKPNEPRGDILLPTVGHALAFINELEHPEMVGVNPEVGHEQMAGLNFAHGVAQALWAGKLFHIDLNGQRGIKYDQDLRFGSGDVKEAFFLVDLLESAGYDGPLHFDFKTPRTEDMSGVWESAAACMRNYLILKEKARAFRADPEVVESLAASRVPELSQSTLGEGESLSDLLAEEIDLAEVGERGYHFERLDQLAMEHLFGLR

SEQ ID NO: 125 - DNA, 1194 bp, Nakamurella multipartita
atggtccgtgcggcaacccccgacgatcgtttctcgttcggcctgtggacggtgtcctggcaggcccgcgaccccttcggtgacgccacccggccggcgcttgacccggtggaggcgatcggcaagctggccgaggccggcgcgtggggcgtcaccttccatgacgacgacgtggtgccgttcggctccgacgacgcgacccgcgaccggctgatcaccgccttccgggatgcctgcaccgagcacgacgtgaccatcgagatggtcaccaccaacctgttcacccaccccgtcttcaaggacggcggcttcacctccaacgaccgttcggtccgccggttcgcgctgcgcaaggtgctgcgcaacatcgacctgaccgccgagctgggggccaagacgttcgtcatgtggggcggccgggaaggcagcgagtacgacgggtccaaggacgtcaacgccgcgctcgaccggtacgccgagggcgtggacacggtggccgcctacatcaagagccgcggctacgacatcaagatcgccctggagcccaagccgaacgagccccggggtgacatcttcctgccgaccatcgggcacgcgcttggctttatcgccaagctcgagcacggcgacatcgtcgggctgaaccccgaggtcgggcacgagcagatggccgggctcaacttcacccagggcatcgggcaggcgctgtgggccggcaagctgttccacatcgatctcaacggccagcggtccatcaagtacgaccaggacctggtgttcggtcacggcgacctgctgtccgcgttcttcaccgtggacctgctcgagaacggcttccccaacggcggtccccgctacgacggtccgcggcacttcgactacaagccctcgcgcacggacggcttcgacggcgtgtgggcctccgcccgggccaacatcgccacctacctgctgctcaaggagcgggcgctggccttccgggccgatccggaggtgcaggccgcgctcgaggcgtcgggtctgtccgaactggccgtcccgaccctcgccgccggcgagagcatcgaggacctgctggccgacgaatccgcgttcgagagctacgacgccgacaaggcggccgagcactcctacgccttcgtgcacctgaaccagctcgcggtcgagcacgccctgggtgcccggctgagctga

SEQ ID NO: 126 - protein, 397 aa, Nakamurella multipartita
MVRAATPDDRFSFGLWTVSWQARDPFGDATRPALDPVEAIGKLAEAGAWGVTFHDDDVVPFGSDDATRDRLITAFRDACTEHDVTIEMVTTNLFTHPVFKDGGFTSNDRSVRRFALRKVLRNIDLTAELGAKTFVMWGGREGSEYDGSKDVNAALDRYAEGVDTVAAYIKSRGYDIKIALEPKPNEPRGDIFLPTIGHALGFIAKLEHGDIVGLNPEVGHEQMAGLNFTQGIGQALWAGKLFHIDLNGQRSIKYDQDLVFGHGDLLSAFFTVDLLENGFPNGGPRYDGPRHFDYKPSRTDGFDGVWASARANIATYLLLKERALAFRADPEVQAALEASGLSELAVPTLAAGESIEDLLADESAFESYDADKAAEHSYAFVHLNQLAVEHALGARLS

SEQ ID NO: 127 - DNA, 1155 bp, Xylanimonas cellulosilytica
gtgagcgacatcaagtacgcgttcggcctctggaccaccggctggcagggcgtcgacccgttcggcgacgcgacccgcccggctctcgacccggccgagaacatccgcaagctcgccgagctcggcgcgcacgcgttcaccttccacgacaacgacgtgtggcccatcgacgccaccgacgccgagcgcgccgccgcgatcgagtcggtcaagaaggcctccgccgagaccggcctggtctgcgagatggtcaccaccaacacgttctcgcacccggtgttcaaggccggcgcgttcacctcgaacgaccgcaacatccgccgctacggcctgcgcaaggtcctcaagcaggtcgacctcggtgccgagctgggcgccagcacgttcgtcatgtggggcggccgcgagggcgtcgagtacgcgaactcgaaggacctgggcaccgcccacgcccgttacgccgagggcatcgacaccgtcgccgcctacatcaagtcgaagggctacgacatgcgcgtcgccctcgagccgaagccgaacgagccccgcggcgacatcttcctgccgacgatcggtcacgccatcgcgctgatcaactcgctcgacaacggcgacatcgtcggcgtgaacccggagacgggccacgagcagatggccggcctgaactacacccacggcctcgccctcgccctgtacgtcggcaagctgttccacatcgacctcaacggtcagaacggcccgaagtacgaccaggacctcgtcttcggtcacggcaacctgctcgacgccttcttcaccgtcgacctgctcgagaacggctcgccgaacggcgagatcgctccttacgtcggctaccgccacttcgactacaagccctcgcgtaccgagtacacggacggcatctgggagtcggctgccgccaacatgaagacctactcgctgctcgccgaggcctcgaaggcgtaccgcgccgacgccgaggtccaggccgcgttcgagaaggccggcgtgctcgacaagtcggcgaccctcgccgagggcgagtcgttcgagtcgttcctcgcggagcccgacgaggacatcaccgagctcggcaagcgtcacgagggcctggtgcacctgcaccagctcgcgctgaaccacatcctcggctga

SEQ ID NO: 128 - protein, 384 aa, Xylanimonas cellulosilytica
MSDIKYAFGLWTTGWQGVDPFGDATRPALDPAENIRKLAELGAHAFTFHDNDVWPIDATDAERAAAIESVKKASAETGLVCEMVTTNTFSHPVFKAGAFTSNDRNIRRYGLRKVLKQVDLGAELGASTFVMWGGREGVEYANSKDLGTAHARYAEGIDTVAAYIKSKGYDMRVALEPKPNEPRGDIFLPTIGHAIALINSLDNGDIVGVNPETGHEQMAGLNYTHGLALALYVGKLFHIDLNGQNGPKYDQDLVFGHGNLLDAFFTVDLLENGSPNGEIAPYVGYRHFDYKPSRTEYTDGIWESAAANMKTYSLLAEASKAYRADAEVQAAFEKAGVLDKSATLAEGESFESFLAEPDEDITELGKRHEGLVHLHQLALNHILG

SEQ ID NO: 129 - DNA, 1194 bp, Clavibacter michiganensis
atggcgctcacccccacccgcgaggacaagttctcgttcggactctggaccatcggctacacgggggccgatcccttcggcggcccgacccgctccgacctcgacgtggtcgagggcgtcgagcgcatctcggagctgggcgcctacggcctcaccttccacgacgacgacctcttcgccttcggatccaccgacgccgagcgccagacgcagatcgaccgcctcaagggcgcgctcagcgacaccggcatcgtcgtgccgatggtcaccaccaacctcttcagcgcgcccgtcttcaaggacggcggcttcaccagcaacgaccgcgccgtccgccggttcgcgatccgcaaggtcctccgcaacatcgacctcgccgccgagctcggcgcgcagacgttcgtgatgtggggcggccgcgagggcgccgagtacgactccgccaaggacgtccggggcgcgctcgagcgctaccgcgaggccgtcaacctgctcggcgactacgtcaccgacaagggctacgacatccgcttcgcgatcgagccgaagcccaacgagccccgcggcgacatcctgctgcccaccctcggccacgcgctcgccttcatcgagaccctcgagcgccccgagctcgtcggcgtcaaccccgaggtcggccacgagcagatggcgggcctcaacttcaccgccggcatcatgcaggcgctgtaccagggcaagctcttccacatcgacctcaacggccagcgcggcatcaagtacgaccaggacctcgtcttcggccacggcgacctgcagaacgcgttctcgctcgttgacctgctggagaacggcggcgtgggcggcggccgctcgtacgacggcccgcgtcacttcgactacaagcccagccgcaccgaggacatcacgggcgtgtgggactcggcggccgcgaacatgcgcatgtacctgctcctcaaggagcgcgcgcaggcgttccgcgccgaccccgaggtccaggaggcgctcgccgccgccaaggtccaggagatctacacgccgacgctgaacgagggcgagagctacgacgacatcctcgccgaccgctcctcctacgaggacttcgacgccccgtcgtacttcgacgccaagggcttcggcttcgtccgcctcaaccagctggcgctcgagcacctcatgggcgcgcgttcgtag

SEQ ID NO: 130 - protein, 397 aa, Clavibacter michiganensis
MALTPTREDKFSFGLWTIGYTGADPFGGPTRSDLDVVEGVERISELGAYGLTFHDDDLFAFGSTDAERQTQIDRLKGALSDTGIVVPMVTTNLFSAPVFKDGGFTSNDRAVRRFAIRKVLRNIDLAAELGAQTFVMWGGREGAEYDSAKDVRGALERYREAVNLLGDYVTDKGYDIRFAIEPKPNEPRGDILLPTLGHALAFIETLERPELVGVNPEVGHEQMAGLNFTAGIMQALYQGKLFHIDLNGQRGIKYDQDLVFGHGDLQNAFSLVDLLENGGVGGGRSYDGPRHFDYKPSRTEDITGVWDSAAANMRMYLLLKERAQAFRADPEVQEALAAAKVQEIYTPTLNEGESYDDILADRSSYEDFDAPSYFDAKGFGFVRLNQLALEHLMGARS

SEQ ID NO: 131 - DNA, 1188 bp, Salinispora tropica
atggcgccccgtcccacccctgctgacaagttctccttcggcctctggacggtgggctggcaggcccgggacccgttcggcgacgccacccgaccgccgctggacgcggtcgaggcggtgcaccgccttgccgacctgggggcgtacggcatcacctttcacgatgatgatctgatccccttcgaggcggacgctgccgtccgcgatgcccacctcacccggttccgtcgggccctcgacgagaccggcctggtggtcccgatggtcaccaccaacctcttcacccatcccgtgttcaaggacggcggcttcaccagcaacgaccgggacgtccggcggtacgcgctccgcaaggcgctgcgtgccgtggacctcgccgcccagctgggcgcgcgcaccttcgtcctgtggggtggtcgggagggtgccgagtacgacgtcgccaaggatgtccgcgccgccctggaccgctaccgcgaggcggttgacctgctctgccagtacgtcgtggcgcagggatacgagctgcggttcgcgatcgagcccaagcccaacgagccgcgcggcgacattctgctgcccaccgtcgggcacgcgctcgccttcatcgccaccctggcccgcccggagctggtcggtctcaacccggaggtcggccatgagcagatggccgggctcaacgtcgcccacggcattgctcaggcgctctggcagggcaagctgtttcacctcgacctcaacggccagcgtggggtcaagtacgaccaggacctggtcttcggccatggtgacctgcttaacgccttcgcactggtcgacctactcgagaacggtggtccaggcggcgggccggcgtatgacggtccccggcacttcgactacaaaccgtctcgtaccgaggaccggaccggggtgtgggcctcggccgaggcaaacatgcgcacctacctgctcctcaaggagcgggccgcggtgttccgggccgatccggaggtcaccgcggcgctggccacgagccgggtgggtgagctggcaacgccaaccctcgcccccggcgagacccacgccggtctccgcgccgatcgcactgccttcgaggagtacgacgtgaccgctgccggcgctcgcggctaccacttcgttcggctcaaccaactcgccgtcgagcatctgctcggtgcgcgctga

SEQ ID NO: 132 - protein, 395 aa, Salinispora tropica
MAPRPTPADKFSFGLWTVGWQARDPFGDATRPPLDAVEAVHRLADLGAYGITFHDDDLIPFEADAAVRDAHLTRFRRALDETGLVVPMVTTNLFTHPVFKDGGFTSNDRDVRRYALRKALRAVDLAAQLGARTFVLWGGREGAEYDVAKDVRAALDRYREAVDLLCQYVVAQGYELRFAIEPKPNEPRGDILLPTVGHALAFIATLARPELVGLNPEVGHEQMAGLNVAHGIAQALWQGKLFHLDLNGQRGVKYDQDLVFGHGDLLNAFALVDLLENGGPGGGPAYDGPRHFDYKPSRTEDRTGVWASAEANMRTYLLLKERAAVFRADPEVTAALATSRVGELATPTLAPGETHAGLRADRTAFEEYDVTAAGARGYHFVRLNQLAVEHLLGAR

SEQ ID NO: 133 - DNA, 1167 bp, Streptomyces sp.
atgaactaccagcccacccccgaggacaagttcagcttcggtctgtggaccgtcggctggcagggccgggaccccttcggggacgccacccgccccgcgctcgacccggtcgaatccgtgcgccgcctggccgagctgggcgcctggggcgtcaccttccacgacgacgacctcatccccttcggctccaccgacgccgagcgcgagcgcatcgtcaagcgcttccgcgaggcgctcgacacgcacggcctcgtcgtcccgatggcgacgaccaacctcttcacgcaccccgtcttcaaggacggcggcttcacgtccaacgaccgcgacgtacgccgctacgcgctccgcaaggtcatccgcaacatcgacctcgccgccgagctcggggccgagacgtacgtcgcctggggcggtcgcgagggtgccgagtccggcggcgccaaggacatccgcctcgcgctcgaccgcatgaaggaggcgttcgacctcctcggcgagtacgtcaccgagcagggctacgacctccgcttcgccatcgagcccaagcccaacgagccgcgcggcgacatcctgctccccaccgtcggccacgccctcgccttcatcgagcgcctggagcgcccggagctgtacggcgtcaacccggaggtcggccacgagcagatggccgggctcaacttcgcccacggcatcgcgcaggcgctgtggtccggcaagctcttccacctcgacctcaacggccagaacggcatcaagtacgaccaggacctgcgcttcggcgccggtgacgtgcgcaacgccttctggctcgtggacctcctggagaccgccgggtacgagggcccgcgccacttcgacttcaagcccccgcggaccgaggacttcgacggcgtgtgggcctcggcggcgggctgtatgcgcaactacctcatcctcaaggagcgcgccgcggccttccgcgccgacccgagggtgcgggacgccctcaaggccgcgcgtctcgaccagctcgccctgcccaccgccgaggacggcctcgcctccctgctcggcgacaagagcgcgtacgaggacttcgacgtggaggccgccgccgagcgcggcatggccttcgaggcgctcgaccagctcgccacggaccacctgctgggcgtccagggctga

SEQ ID NO: 134 - protein, 388 aa, Streptomyces sp.
MNYQPTPEDKFSFGLWTVGWQGRDPFGDATRPALDPVESVRRLAELGAWGVTFHDDDLIPFGSTDAERERIVKRFREALDTHGLVVPMATTNLFTHPVFKDGGFTSNDRDVRRYALRKVIRNIDLAAELGAETYVAWGGREGAESGGAKDIRLALDRMKEAFDLLGEYVTEQGYDLRFAIEPKPNEPRGDILLPTVGHALAFIERLERPELYGVNPEVGHEQMAGLNFAHGIAQALWSGKLFHLDLNGQNGIKYDQDLRFGAGDVRNAFWLVDLLETAGYEGPRHFDFKPPRTEDFDGVWASAAGCMRNYLILKERAAAFRADPRVRDALKAARLDQLALPTAEDGLASLLGDKSAYEDFDVEAAAERGMAFEALDQLATDHLLGVQG

SEQ ID NO: 135 - DNA, 1170 bp, Streptomyces pristinaespiralis
atgacggaacgcttcacccccacccccgacgacaagttcagcttcggcctctggacggtcggctggcagggccgggacccgttcggggacgcgacccggccgcacctggaccctgctgagtccgtccggcggctcgccgacctcggcgcgtacggtgtgaccttccacgacgacgacctgatccccttcgggtcgagcgacagcgagcgcgaggcgcacatcaagcgcttccgcgaggcgctggacgccaccggcgtcatcgtgccgatggcgacgaccaacctcttcacccacccggtcttcaaggacggcggcttcaccgccaacgaccgtgacgtgcgccggtacgcgctgcgcaagaccatccgcaacatcgacctggccgtggagctgggcgcgcagacgtacgtcgcctggggcggccgcgagggcgcggagtccggtggcgccaaggacgtgcgcgtcgcgctcgaccggatgaaggaagccttcgacctgctcggcgagtacgtcacggagcagggctacgacctgcgcttcgccatcgagcccaagcccaacgagccccgcggcgacatcctgctcccgacggtcggccacgcgctggcgttcatcgagcgcctggagcgcccggagctgtacggcgtcaacccggaggtcggccacgagcagatggccgggctcaacttcccgcactccatcgcgcaggcgctgtgggcgggcaagctcttccacatcgacctgaacggccagagcggcatcaagtacgaccaggacctgcgcttcggcgccggtgatctgcggtccgcgttctggctggtggacctgctggagacggccggctacgcgggcccgcggcacttcgacttcaagccgccgcggaccgaggacttcgacggcgtgtgggagtcggcggccggctgcatgcgcaactacctgatcctcaaggagcgcgccgcggcgttccgctcggacccggaggtccaggaggcactgcgtgcctcgcgcctggacgagctggcgcggccgacggccgaggacggactggcggcgctgctggccgaccgtaccgcgttcgaggactacgacgtggacgccgccgccgagcgcgggatggcgttcgagcgcctcgaccagctggcgatggaccacctgctcggagcgcgctga

SEQ ID NO: 136 - protein, 389 aa, Streptomyces pristinaespiralis
MTERFTPTPDDKFSFGLWTVGWQGRDPFGDATRPHLDPAESVRRLADLGAYGVTFHDDDLIPFGSSDSEREAHIKRFREALDATGVIVPMATTNLFTHPVFKDGGFTANDRDVRRYALRKTIRNIDLAVELGAQTYVAWGGREGAESGGAKDVRVALDRMKEAFDLLGEYVTEQGYDLRFAIEPKPNEPRGDILLPTVGHALAFIERLERPELYGVNPEVGHEQMAGLNFPHSIAQALWAGKLFHIDLNGQSGIKYDQDLRFGAGDLRSAFWLVDLLETAGYAGPRHFDFKPPRTEDFDGVWESAAGCMRNYLILKERAAAFRSDPEVQEALRASRLDELARPTAEDGLAALLADRTAFEDYDVDAAAERGMAFERLDQLAMDHLLGAR

SEQ ID NO: 137 - DNA, 1170 bp, Roseiflexus sp.
atgagtgacatgtacgaacccaaacccgaacacaaattcaccttcggactctggacggttggcaacatcgggcgtgatccgttcggcgaaccggtgcgccagcctctttcgccggtcgaaatcgtccatctgctggcggaagttggcgcgtatggcgtcaatttccacgacaacgacctgatcccgatcgatgcaacaccggcggatcgcgaccgcattctacgcgagttcaaggcggcgctccaggaaaccggcctcgttgtgccgatggcgacgaccaacctctttgccgatccggtcttcaaggatggcgcctttacctcgaacgatcctaaagtgcgcgcatacgcgctacaaaaaacaatgcgcgcaatcgatctgggcgttgaatgtggcgcgaaggtgtacgttttctggggcggtcgcgaaggcgttgagagtgacgcggcgaaggatccgcaggaagggttgaaacgctaccgcgaagcgatcaatttcctctgcgcctatgtgaaagaccaggggtacgacctgaaattcgcgctcgaacccaagccgaacgagccgcgcggcgacatctatctggcgactgtcgggcacgcgctggcgttcatcaacacgctcgactacccggacatggtcgggctgaacccggaagtcgcccatgaaacaatggcaggactgaacttcctgcacggcgtcgcgcaggcgtgggatgctggcaaactgttccatatcgacctgaacgatcaggtaatcgggcgctacgatcaggatttccgcttcggagcggtcaatctgaaagccgccttcttcctggtgcgcttcctggaaaaggtcgggtaccaggggagtcgtcacttcgatgcacacgcctaccgcaccgaggattatgaaggggtgaaagcgtttgcccgcggctgtatgcgcacctacctgatcttgaaagaaaaggcgcgccgctttgacgaagatgccgagattcaggcgttgctggcggaaatctctgccgacgacggctcgatggcgccgttccagggcggctacagccgcgaaaaggctgccgcgctcaaggcgcatccgttcgaccgggcggcgcttgggcgacgcgggctggcgtatgagcgcctcgatcaactgacgaacgaattgttgctcggcgttcgttaa

SEQ ID NO: 138 - protein, 389 aa, Roseiflexus sp.
MSDMYEPKPEHKFTFGLWTVGNIGRDPFGEPVRQPLSPVEIVHLLAEVGAYGVNFHDNDLIPIDATPADRDRILREFKAALQETGLVVPMATTNLFADPVFKDGAFTSNDPKVRAYALQKTMRAIDLGVECGAKVYVFWGGREGVESDAAKDPQEGLKRYREAINFLCAYVKDQGYDLKFALEPKPNEPRGDIYLATVGHALAFINTLDYPDMVGLNPEVAHETMAGLNFLHGVAQAWDAGKLFHIDLNDQVIGRYDQDFRFGAVNLKAAFFLVRFLEKVGYQGSRHFDAHAYRTEDYEGVKAFARGCMRTYLILKEKARRFDEDAEIQALLAEISADDGSMAPFQGGYSREKAAALKAHPFDRAALGRRGLAYERLDQLTNELLLGVR

SEQ ID NO: 139 - DNA, 1161 bp, Meiothermus ruber
atgtaccagcccagacccgagcataagttcacctttggcctttggacggtaggcaacatcgggcgcgacccctttggcgaggccgtgcgggaacggctcgagcccgactacgtggtgtacaggctggccgagctgggggcctacggggtcaacctgcacgacgaagacctgatcccccgtggcacgcccccggccgagcgcgaggccatcctgcgccgcttcaagaaggccctgcaggacaccggcctcaaggtgcccatggtcaccgccaacctcttctccgacccggcctttaaggacggggccctgaccagccccgacccctgggtgcgggcctacgccctgaagaagagcctcgagaccctcgacctgggcgccgagctgggggcccagatttacgtggtctggccggggcgggagggggccgaggtagacgccaccggcaaggccccgcgggtatgggcctggttccgcgaggccctggacttcatggccgagtatgcggaggagcagggctacaactaccgctttgccctggagcccaaacccaacgagcctcgaggcgacatctacctgcccaccgtgggcagcatgctggccctgatcggcaccctgaagcacccgcaccgctttggcctcaaccccgagttcgcccacgagaccatggccgggctcaacttcgtgcacgcggtggcccaggccctggagatgggcaagctcttccacatcgacctgaacgaccagcgcatgagccgcttcgaccaggatctgcgctttggctcggagaacctcaaggccgcgttcttcctagtggatctgctcgaggccagcggttacgacggcccccgccacttcgacgcccacgccctgcgcaccgaggacgaggccggggtctgggcttttgcccggggctgtatgcgcacctacctgattctgaaggagaaagcccaggccttccgggccgaccccgaggtgaaggctttgctcgaggcctactaccaggccgaccccgagcctttggccctgctgggggcctacagccgggaaaaagctcagcggctcaagcagctcgagctgcccgaggcctgccgcagccgcggttatgccctggagcagctcgaccagctcgccgtagagcacctgctgggggtacggggatga

SEQ ID NO: 140 - protein, 386 aa, Meiothermus ruber
MYQPRPEHKFTFGLWTVGNIGRDPFGEAVRERLEPDYVVYRLAELGAYGVNLHDEDLIPRGTPPAEREAILRRFKKALQDTGLKVPMVTANLFSDPAFKDGALTSPDPWVRAYALKKSLETLDLGAELGAQIYVVWPGREGAEVDATGKAPRVWAWFREALDFMAEYAEEQGYNYRFALEPKPNEPRGDIYLPTVGSMLALIGTLKHPHRFGLNPEFAHETMAGLNFVHAVAQALEMGKLFHIDLNDQRMSRFDQDLRFGSENLKAAFFLVDLLEASGYDGPRHFDAHALRTEDEAGVWAFARGCMRTYLILKEKAQAFRADPEVKALLEAYYQADPEPLALLGAYSREKAQRLKQLELPEACRSRGYALEQLDQLAVEHLLGVRG

SEQ ID NO: 141 - DNA, 1188 bp, Arthrobacter sp.
atgagcgttcagccgacccctgcagaccacttcacctttggcctctggaccgtaggatggaccggcgccgacccattcggtgtcgccacccgcaagaacctggacccggtagaagccgtccacaagctggccgagctcggcgcctacggcatcaccttccacgacaatgacctgattccttttgacgccaccgaggcagagcgcgaaaagatccttggtgacttcaaccaggcgctgaaggacaccggcctgaaggtcccaatggtgaccaccaacctgttcagccacccggtcttcaaggacggcggcttcacctctaacgaccgctcgatccgtcgttttgcactggctaaggtcctgcacaacatcgacttggcagccgagatgggcgccgaaaccttcgtcatgtggggcgggcgcgaaggcagcgaatacgacggttccaaggacctggccgcagcacttgatcgcatgcgcgaaggcgtggacacggcagctggctacatcaaggacaagggttacaacctgcgcatcgcgctggagccaaagccaaatgaaccacgcggcgacatcttcctgcctaccgtcggccacggcctggccttcatcgagcagctggagcacggcgacatcgtcggcctgaacccagaaaccggccacgagcagatggccggcctgaacttcacccacggcatcgctcaggcactgtgggccgagaagctgttccacattgacctcaacggccagcgcggcatcaagtacgaccaggacctggtcttcggccacggcgatctgaccagcgcgttcttcaccgtagacctgctggaaaacggcttccctaacggcggaccaaagtacaccggcccacgccacttcgactacaagccatcgcgcaccgacggctacgacggcgtgtgggactcggccaaggccaacatgtccatgtacctgctgctcaaggaacgtgccctggccttccgtgcggatccagaggtacaggaagccatgaagacctcgggcgtcttcgaactgggcgaaaccaccctgaacgccggggaaagcgcagcggatctgatgaatgattccgcgagcttcgcaggctttgacgccgaggccgccgcagagcgcaacttcgcgttcatccgcctgaaccagctggccatcgagcacctgctcggctcccgctaa

SEQ ID NO: 142 - protein, 395 aa, Arthrobacter sp.
MSVQPTPADHFTFGLWTVGWTGADPFGVATRKNLDPVEAVHKLAELGAYGITFHDNDLIPFDATEAEREKILGDFNQALKDTGLKVPMVTTNLFSHPVFKDGGFTSNDRSIRRFALAKVLHNIDLAAEMGAETFVMWGGREGSEYDGSKDLAAALDRMREGVDTAAGYIKDKGYNLRIALEPKPNEPRGDIFLPTVGHGLAFIEQLEHGDIVGLNPETGHEQMAGLNFTHGIAQALWAEKLFHIDLNGQRGIKYDQDLVFGHGDLTSAFFTVDLLENGFPNGGPKYTGPRHFDYKPSRTDGYDGVWDSAKANMSMYLLLKERALAFRADPEVQEAMKTSGVFELGETTLNAGESAADLMNDSASFAGFDAEAAAERNFAFIRLNQLAIEHLLGSR

SEQ ID NO: 143 - DNA, 1173 bp, Thermobaculum terrenum
atggcagattatacccctaagaagagcgataaatttacctttgggctatggaccgtaggtaatatagggcgagatccctttggtgatcctgtaagaacgcccatgaccccggagcatatagtacataagctcagtgagctcggggcatatggcgtgaactttcatgataacgacctagtgccgtttggagcgtcggcacaggagagagataggatagtcaaaagcttcaagaaggccttggaagataccggtatggtggttcctatggctaccaccaatcttttcacgcaccctatattcaaagatggtgcttttacttcttcagatgccaaggtcagagcatttgctctacaaaagaccatgcaggctatagatctaggagccgagctaggggcgactacttatgtcttctggggaggaagagaaggatccgagaccgatgcctacagaaaccctgtagatgctatcaagcggtttagagaggctattaactatttgtgtgactatgtgatcgatcagggctataacatgcgttttgcactggaacctaaacctaatgaacccagaggagatatttatttccccacagtaggacatatgctacattttatctccactttggatcatcccgagatggtcggtctaaacccagagtttgctcatgagaccatggctggtttgaacttcgtacatgcagtggctgaagctatagaggctggtaagctatttcacatagatctgaatgatcaaataattgggagatatgatcaagatttcagattcgcctctgaaaatcccaagcgagcattcttcttggtgaagctacttgaggacagcggttacgatggccccagacactttgacgcccacgcctacaggaccgaggatgaagaaggtgtttgggcttttgccaggggatgcatgcggtcttatctgatattgaaggagaaggcgcagaagttcaacaaagatgccgaaattcaaggactgctagctgagatcagagctgaagatgaaaactatcaggggccaagtgcttcagacggctactctagggagcatgcgcagcaggtaaaggattataaatttgacgtcactgcactatcgcagcgtggaaggaaatatgaggagctggatcagctagtaatggagctgttgctcggagtaagataa

SEQ ID NO: 144 - protein, 390 aa, Thermobaculum terrenum
MADYTPKKSDKFTFGLWTVGNIGRDPFGDPVRTPMTPEHIVHKLSELGAYGVNFHDNDLVPFGASAQERDRIVKSFKKALEDTGMVVPMATTNLFTHPIFKDGAFTSSDAKVRAFALQKTMQAIDLGAELGATTYVFWGGREGSETDAYRNPVDAIKRFREAINYLCDYVIDQGYNMRFALEPKPNEPRGDIYFPTVGHMLHFISTLDHPEMVGLNPEFAHETMAGLNFVHAVAEAIEAGKLFHIDLNDQIIGRYDQDFRFASENPKRAFFLVKLLEDSGYDGPRHFDAHAYRTEDEEGVWAFARGCMRSYLILKEKAQKFNKDAEIQGLLAEIRAEDENYQGPSASDGYSREHAQQVKDYKFDVTALSQRGRKYEELDQLVMELLLGVR

SEQ ID NO: 145 - DNA, 1170 bp, Janibacter sp.
atgaccacctccgcccacgacttcacgcccacccgtgacgacaagttctcgttcggcctgtggaccgtcggctggcagggcgtcgacgtcttcggcggcgcggtccgccctccgctcgacccggccgaagcggtccacagactctctgaccttggtgcctggggcatcaccttccacgacgacgacgtcatccccttcggggcgagcacccaggagcggctcgaccacctcgcgccgttccgcaaggccctcgccgacaccgggctcgtcgtgccgatggtgacgacaaacctgttctcccaccccgttttccgcgacggtggcttcaccaacaacgaccgcgacgtccgccgctttgcgatcagcaaggtcgccgacaacatcgacctcgccgtcgagctcggtgccacgacgttcgtcgcctggggtgggcgcgagggcgcggagtcgggtgcggccaaggacgtccggtcagccctcgaccgctacaaggaggctttcgacgtcctcggcgcctatgtcctcgagcagggctacgacctcaagttcgctctcgaacccaagcccaacgagcctcgcggcgacatcctgctcccgaccatcggccacgccctcgccttcatcaacgagctcgagcaccccgagctcgtcggcctcaaccccgaggtcggacacgaggagatggccgggctcaactacgcccacggcatcgcccaggcgctgtggcacggcaagctcttccacctcgacctcaacggtcagcacggtccccgcttcgaccaggacctccgcttcggggccggcaacgcccgtggcgccttctggaccgtcgacaccgttgagcagggtggctacgacggcccgcgccacttcgacttcaaaccgccccgcaccgaggacatggacggggtgtgggcgtcggccgccggctgcatgcgcaactacctgatcctgcgcgagaagtcgcgcgccttccgtgtcgacccggaggtccaggcggctctcaaggcctcccgcctcgaccagctcgccacccccaccctgtcgccgggcgagggcctcgatgccctgcgcgcggagagtttcgacccggaggaggcagccgcccgcggcatggccttcgagcacctcgaccagctcgctctcgagcacctctacgggatccggtga

SEQ ID NO: 146 - protein, 389 aa, Janibacter sp.
MTTSAHDFTPTRDDKFSFGLWTVGWQGVDVFGGAVRPPLDPAEAVHRLSDLGAWGITFHDDDVIPFGASTQERLDHLAPFRKALADTGLVVPMVTTNLFSHPVFRDGGFTNNDRDVRRFAISKVADNIDLAVELGATTFVAWGGREGAESGAAKDVRSALDRYKEAFDVLGAYVLEQGYDLKFALEPKPNEPRGDILLPTIGHALAFINELEHPELVGLNPEVGHEEMAGLNYAHGIAQALWHGKLFHLDLNGQHGPRFDQDLRFGAGNARGAFWTVDTVEQGGYDGPRHFDFKPPRTEDMDGVWASAAGCMRNYLILREKSRAFRVDPEVQAALKASRLDQLATPTLSPGEGLDALRAESFDPEEAAARGMAFEHLDQLALEHLYGIR

SEQ ID NO: 147 - DNA, 1194 bp, Brachybacterium faecium
atgaccgcacccacccccacccgtgacgacaagttctccttcggcctgtggaccaccggctggcaggcccaggaccagttcggctccgccacccgcccgccgctggacctcaccgaccacgtgcgcaagctcgccgacctcggcgcctggggcttcaccttccacgacaacgacgtggtgcccttcgatgccacccccgccgagcgcgagcgcatcctcggcgagctgaagaaggtcaccgaggagaccggcctggtgatcgagatggtcaccaccgacaccttcgcccaccccgtcttcaaggacggcgccttcacctccaacgaccgctccgtgcgccgcttcggcctgcgcaaggtgctcgccaacgtggatctcgccgctgagctcggcgcgaccaccttcgtgatgtggggcgggcgcgagggctccgagtacgacggctccaaggacctgctggccgcgcaccagcgctacgccgagggcatcgacaccgtcgccggctacatcaaggacaagggctacgacctgcgcatcggcctcgagcccaagccgaacgagccccgcggcaacatcttcctgcccacgatcggccacgcgctggccttcatcgagcagctcgagcacggcgacatcgtgggcatcaaccccgagaccggccacgagcagatggcgacgctgaactacacccacggcatcgcccaggcgctgtgggcggagaagctcttccacatcgacctcaacggccagcacggcccgatgtacgaccaggacctcgtgttcggccacggcgacctgatcagcgccttcttcaccgtggacctgctcgagaacggcttcccctcgaagccgggcgcctacgagggtgcccgccacttcgacttcaagccctcgcgcaccgagcacgagaagggccagtacgactcggccgccgcgaacatggagatgtacctgatgctcaaggagcgcgccctcgcgttccgtgccgacgccgaggtccaggaagcgctgaagtactccggcatcgaggagctcgccgagccgaccctcgctgcgggcgagaccgtcaccgacctcctcgccgatcgctcctccttcgaggacttcgacgcggacaaggcgggcgagcgcaactacggcttcgtgcgcctgcagcagctggccctccagcacctgctcggcttccgcgcctga

SEQ ID NO: 148 - protein, 397 aa, Brachybacterium faecium
MTAPTPTRDDKFSFGLWTTGWQAQDQFGSATRPPLDLTDHVRKLADLGAWGFTFHDNDVVPFDATPAERERILGELKKVTEETGLVIEMVTTDTFAHPVFKDGAFTSNDRSVRRFGLRKVLANVDLAAELGATTFVMWGGREGSEYDGSKDLLAAHQRYAEGIDTVAGYIKDKGYDLRIGLEPKPNEPRGNIFLPTIGHALAFIEQLEHGDIVGINPETGHEQMATLNYTHGIAQALWAEKLFHIDLNGQHGPMYDQDLVFGHGDLISAFFTVDLLENGFPSKPGAYEGARHFDFKPSRTEHEKGQYDSAAANMEMYLMLKERALAFRADAEVQEALKYSGIEELAEPTLAAGETVTDLLADRSSFEDFDADKAGERNYGFVRLQQLALQHLLGFRA

SEQ ID NO: 149 - DNA, 1182 bp, Beutenbergia cavernae
atgacgcgcacccccacgacccaggacaagttctcgttcggcctgtggacggtcggctggaccggccgcgaccagttcggcgaggccagccgccctgcgctcgacccgtgggactacctcggcccgctcgcggaggccggtgcgtggggcatcacgttccacgacgacgacgtcgtcccgttcggcacgcccgacgccgagcgtgagcagatcctcacgcgcttcaagcaggtggccgacgacgccggtctcgtcatcgagatggtcaccacgaacctgttcagccacccggtgttcaaggacggcggcttcaccgcgaacgaccggggcgtccgtcgcttcgccctgcggaaggtgctgcgcaacgtcgacctcgcggccgagctcggcgcggcgacgttcgtcatgtggggcggccgcgagggcgccgagtacgacggcgccaaggacgtgaacgcggcgctcgaccggtaccgcgagggcatcgacaccgtcgccgcgtacatcaaggagaagggctacgacctgcgcatcgcgctcgagccgaagccgaacgagccgcgcggcgacatcttcctcccgacggtcgggcacgctctcggcttcatcgccgagctcgagcacggcgacatcgtgggcctcaacccggaggtcgggcacgagcagatggccgccctcaactacacccacgggatcgcgcaggcgctgtggagcggcaagctcttccacatcgacctcaacgggcagcgctcgatcaagtacgaccaggacctcgtgttcggccacggcgacctgctgagcgcgttcttcaccgtcgacctgctggagaacggcttcccgtccggcggccctacgtacgacggcccgcgccacttcgactacaagccgtcccgcaccgagggcttcgacggcgtgtgggcgtccgcgcgcgcgaacatggagacgtacctcctgctcgccgagaaggcgcgcgcctatcgcgccgacccacgcgtgcaggaggcgttcgcggcgtccggagtcctggagctcagcgccccgacgctgtccgacggcgagtcgatcgccgacctgctcgcggaccgcggcgcgttcgaggactacgacgctgacgccgccggcgcccgcgagacgaacttcgtggagctgaaccagctcgcgatcgcgcacctcgtcggctga

SEQ ID NO: 150 - protein, 393 aa, Beutenbergia cavernae
MTRTPTTQDKFSFGLWTVGWTGRDQFGEASRPALDPWDYLGPLAEAGAWGITFHDDDVVPFGTPDAEREQILTRFKQVADDAGLVIEMVTTNLFSHPVFKDGGFTANDRGVRRFALRKVLRNVDLAAELGAATFVMWGGREGAEYDGAKDVNAALDRYREGIDTVAAYIKEKGYDLRIALEPKPNEPRGDIFLPTVGHALGFIAELEHGDIVGLNPEVGHEQMAALNYTHGIAQALWSGKLFHIDLNGQRSIKYDQDLVFGHGDLLSAFFTVDLLENGFPSGGPTYDGPRHFDYKPSRTEGFDGVWASARANMETYLLLAEKARAYRADPRVQEAFAASGVLELSAPTLSDGESIADLLADRGAFEDYDADAAGARETNFVELNQLAIAHLVG

SEQ ID NO: 151 - DNA, 1191 bp, Geodermatophilus obscurus
atgaccgcgccgcagcccaccaaggacgaccggttcaccttcggcctctggaccgtcggctggcaggcccgcgacccgttcggcgacgcgacccgcccggcgctcgacccggtggagagcgtgcaccgcctcgccgagctgggcgccgccggcgtcaccttccacgacgacgacctgatcccgttcggcagcgaggacgccgagcgcgccaagcacgtgcagcgcttcacggacgcgctggaggagaccggcctcgtcgtccccatggccacgaccaacctgttcacccacccggtgttcaaggagggcgcgctcaccgccaacgaccgcgacgtccgccggtacgcgctgcgcaaggtcatgcggaacatggacctcgccgccgagctcggcgcgcggacctacgtgctgtggggcggccgcgagggcgccgaggtcgacagcgccaaggacctgcgtgccgcgctcgaccgctaccgcgagggcatcgacaccctggcgcagtactcggaggaccgcggctacgggctgcgcttcgccctggagcccaagccgaacgagccgcgcggcgacatcttcctgccgaccatcggtcacgccctggccttcatctccactctcgagcacgccgacctggtcggcctgaaccccgaggtcggccacgagcagatggccaacctcaactacacgcacggcatcgcccaggcgctgtggcagggcaagctcttccacatcgacctcaacggccagcacgggcccaagttcgaccaggacctggtcttcggccacggcgacctgctcagcgccttcggcaccgtcgacctgctcgagcacggcggcccgaacgggagtccggcctacgacgggccgcggcacttcgactacaagccgctgcgcaccgaggacatcgacggggtgtgggcctcggccgcggccaacatgcgcacctacctgctgctcaaggagcgggcggcggccttccgcgccgacccggaggtgcaggaggcgctggccgccgcccgcgtgcccgagctggcgcagcccacgctggccgacggcgagacgtacgaggacctgctggccgaccgtgcggcgttcgaggagttcgacgcggaggcggccggtgcccgtcccggtggtcaggtgcggctctcgcagctggcggtggagcacctcctcggcgcccgctga

SEQ ID NO: 152 - protein, 396 aa, Geodermatophilus obscurus
MTAPQPTKDDRFTFGLWTVGWQARDPFGDATRPALDPVESVHRLAELGAAGVTFHDDDLIPFGSEDAERAKHVQRFTDALEETGLVVPMATTNLFTHPVFKEGALTANDRDVRRYALRKVMRNMDLAAELGARTYVLWGGREGAEVDSAKDLRAALDRYREGIDTLAQYSEDRGYGLRFALEPKPNEPRGDIFLPTIGHALAFISTLEHADLVGLNPEVGHEQMANLNYTHGIAQALWQGKLFHIDLNGQHGPKFDQDLVFGHGDLLSAFGTVDLLEHGGPNGSPAYDGPRHFDYKPLRTEDIDGVWASAAANMRTYLLLKERAAAFRADPEVQEALAAARVPELAQPTLADGETYEDLLADRAAFEEFDAEAAGARPGGQVRLSQLAVEHLLGAR

SEQ ID NO: 153 - DNA, 1185 bp, Actinoplanes missouriensis
gtgtctgtccaggccacacgcgaagacaagttctccttcggtctctggaccgttggatggcaggctcgtgacgcgttcggtgacgccacgcgtacggcactcgacccggtcgaggccgtgcacaagctcgctgagatcggcgcctacggcatcacgttccacgacgacgacctggtgcccttcggctcggacgcccagacccgcgacggcatcatcgcgggcttcaagaaggcgctcgacgagaccggcctgatcgtcccgatggtgaccaccaacctcttcacccacccggtgttcaaggacggcggcttcaccagcaacgaccgttccgtgcggcgctacgcgatccgcaaggtgctgcgccagatggacctcggcgccgagctgggcgcgaagacgctcgtcctctggggcggccgcgagggcgccgagtacgactcggccaaggacgtcagcgccgccctcgaccgctaccgcgaggcgctcaacctgctcgcgcagtactccgaggaccgcggttacggcctgcgcttcgccatcgagccgaagccgaacgagccccgcggcgacatcctgctcccgaccgccggccacgccatcgcgttcgtgcaggagctggagcgtcccgagctcttcggcatcaacccggagaccgggcacgagcagatgtcgaacctcaacttcacccagggcatcgcccaggcgctgtggcacaagaagctgttccacatcgacctgaacggtcagcacggcccgaagttcgaccaggacctggtcttcggccacggtgacctgctcaacgcgttctcgctggtcgacctcctggagaacggtccggacggcgccccggcgtacgacggaccccgtcacttcgactacaagccgtcccgtaccgaggactacgacggcgtctgggagtcggcgaaggccaacatccggatgtacctgctgctcaaggagcgggccaaggcgttccgcgccgaccccgaggtgcaggaggcgctcgccgccagcaaggtcgcggagctgaagaccccgaccctgaacccgggcgagggatacgccgagctgctcgccgaccgcagcgcgttcgaggactacgacgccgacgccgtgggcgccaagggcttcggcttcgtcaagctgaaccagctcgcgatcgagcacctgctcggagcccgctga

SEQ ID NO: 154 - protein, 394 aa, Actinoplanes missouriensis
MSVQATREDKFSFGLWTVGWQARDAFGDATRTALDPVEAVHKLAEIGAYGITFHDDDLVPFGSDAQTRDGIIAGFKKALDETGLIVPMVTTNLFTHPVFKDGGFTSNDRSVRRYAIRKVLRQMDLGAELGAKTLVLWGGREGAEYDSAKDVSAALDRYREALNLLAQYSEDRGYGLRFAIEPKPNEPRGDILLPTAGHAIAFVQELERPELFGINPETGHEQMSNLNFTQGIAQALWHKKLFHIDLNGQHGPKFDQDLVFGHGDLLNAFSLVDLLENGPDGAPAYDGPRHFDYKPSRTEDYDGVWESAKANIRMYLLLKERAKAFRADPEVQEALAASKVAELKTPTLNPGEGYAELLADRSAFEDYDADAVGAKGFGFVKLNQLAIEHLLGAR

SEQ ID NO: 155 - DNA, 1170 bp, Streptomyces violaceusniger
atgagcttccagcccacccccgaggacaagttcaccttcggtctgtggaccgtcggctggcagggaagggacccgttcggcgacgccacccgccctgccctcgacccggtcgagaccgtgcagcgcctggccgagctgggcgcctacggagtgaccttccacgacgacgacctgatccccttcgggtcgtccgacaccgagcgcgagtcgcacatcaagcggttccgccaggccctggacgccactggcatgacggtgccgatggccaccacgaacctcttcacccaccccgtcttcaaggacggcggtttcaccgccaacgaccgcgacgtgcgccgctacgcgctgcgcaagacgatccgcaacatcgacctggcggccgagctgggcgccaagacgtacgtcgcctggggcggccgtgagggcgccgagtccggtggcgccaaggacgtgcgcgacgccctcgaccgcatgaaggaggcgttcgacctcctgggcgagtacgtcaccgcccagggctacgacctccgcttcgccatcgagcccaagcccaacgagccccgcggcgacatcctcctgcccaccgtcggccacgccctggccttcatcgagcgcctggagcgcccggagctgtacggcgtcaacccggaggtcggccacgagcagatggccggcctgaacttcccgcacggcatcgcgcaggccctgtgggcgggcaagctcttccacatcgacctcaacggccagtccggcatcaagtacgaccaggacctgcggttcggcgccggcgacctgcgggcggcgttctggctggtcgacctcctggagagcgccggttacgagggcccgcggcacttcgacttcaagccgccgcggaccgaggacttcgacggcgtgtgggcctcggccgagggctgcatgcgcaactacctgatcctcaaggagcgcgcggccgccttccgcgccgacccggaggtgcaggaggccctgcgcgccgcgcgtctggaccagctggcccagccgaccgcggcggacggcctggaggccctgctcgccgaccgcaccgcgttcgaggacttcgacgtggaggcggccgccgcgcgcgcggcatggccgttcgaacgcctcgaccagctggcgatggaccacctgctgggcgcgcgcggctga

SEQ ID NO: 156 - protein, 389 aa, Streptomyces violaceusniger
MSFQPTPEDKFTFGLWTVGWQGRDPFGDATRPALDPVETVQRLAELGAYGVTFHDDDLIPFGSSDTERESHIKRFRQALDATGMTVPMATTNLFTHPVFKDGGFTANDRDVRRYALRKTIRNIDLAAELGAKTYVAWGGREGAESGGAKDVRDALDRMKEAFDLLGEYVTAQGYDLRFAIEPKPNEPRGDILLPTVGHALAFIERLERPELYGVNPEVGHEQMAGLNFPHGIAQALWAGKLFHIDLNGQSGIKYDQDLRFGAGDLRAAFWLVDLLESAGYEGPRHFDFKPPRTEDFDGVWASAEGCMRNYLILKERAAAFRADPEVQEALRAARLDQLAQPTAADGLEALLADRTAFEDFDVEAAAARAAWPFERLDQLAMDHLLGARG

SEQ ID NO: 157 - DNA, 1176 bp, Actinomyces odontolyticus
atgacatccacccccgacaacaagttctccttcggcctgtggacggtcggctggaatgctgtcgaccccttcggcacggggacccgcccggtgctcgacccgtgggagtacacggaaaagctcgcggaggtcggggcgtggggcattaccttccacgacaatgacgtgttcgacttcgacgcgtcggatcaggagcgtcacgaccgcgtcatgaaggtgaaggaggcggcggatgcggctggcctcgtcattgagatggtcacgacgaacacgttcacgcacccggtcttcaaggatggcggcctgacgaacaacgaccgctcgatccgccgtttcggcctgcgtaagatcctgcgcaacgtggatctggctgcggagatgggcgcgacgacgttcgtcatgtggggcggacgcgagggcgcagagtacgactcgtcgaaggacctgaatgcggcattcgaccgctacaaggagggcctggacacggtcgccgcctacatcaagtcgcgcggctacgacctaaagattggcctggagccgaagccgaacgagcctcgcggcgacattttcctgccgacggtcggccacgcgctggcccttatcgcgcagctggagcacggcgacatcgtgggcctgaacccggagacgggccacgagcagatggccggcctgaactacacgcatgcgctggcacaggcgctcaacgcgggcaagctcttccacattgacctcaacggccagtcgggcatcaagtacgaccaggacaaggcgttcggtcacggcgacctggccagcgcgttcttcacggttgacctgctggagaacggcttcccgggcggcggcccgcgctacgagggtccgcgccacttcgactacaagccgagccgcacggagggcatggagggcgtgtgggagtccgcgcgcgcgaacatcgagatgtacctgacgctggcggccaaggcccgcgcgttccgcgaggatccggtcacccaggagctgctcgaggctgcgtcggttcccgagctgggcgaatccacgctggcggcgggcgagtccctcgaggacttcttggcggatcgcagctcctacgaggagttcgacgcgcaggccgccggcgagcgcgagtaccacttcgtggagctgtaccagcaggcgatgcgtcacctgatcggctga

SEQ ID NO: 158 - protein, 391 aa, Actinomyces odontolyticus
MTSTPDNKFSFGLWTVGWNAVDPFGTGTRPVLDPWEYTEKLAEVGAWGITFHDNDVFDFDASDQERHDRVMKVKEAADAAGLVIEMVTTNTFTHPVFKDGGLTNNDRSIRRFGLRKILRNVDLAAEMGATTFVMWGGREGAEYDSSKDLNAAFDRYKEGLDTVAAYIKSRGYDLKIGLEPKPNEPRGDIFLPTVGHALALIAQLEHGDIVGLNPETGHEQMAGLNYTHALAQALNAGKLFHIDLNGQSGIKYDQDKAFGHGDLASAFFTVDLLENGFPGGGPRYEGPRHFDYKPSRTEGMEGVWESARANIEMYLTLAAKARAFREDPVTQELLEAASVPELGESTLAAGESLEDFLADRSSYEEFDAQAAGEREYHFVELYQQAMRHLIG

SEQ ID NO: 159 - DNA, 1179 bp, Mobiluncus mulieris
atggttcgcaaccccaccaaagcagacagattttccttcggtatatggacagttggttggacaggaaccgaccctttcggcacggattctcgtagttcgctagacccttgggaatacgcggataaactggcggaactcggcgcctggggtatcacattccatgacaatgacgtattccccttcaatgccagcgaaacagaaagaaaccaacgagtaaaacggctaaaggatgccgccgacaaggccggcttggtcatcgaaatggtcaccaccaatactttcactcaccccgtgttcaaagatggtggattaacctctaacgatcgagctgtgcgtcgttttggactgcgtaaagtacttaaaaacgtcgacttagcggccgaaatgggcgctaccaccttcgtgatgtggggtggtcgagaaggcgcggaatacgattcctcgaaggatctctacgccgcccacgcccgatatgcggaaggccttgatacagtggcggcctatatcaagcagcaaggctacaatctaaagattggcttggaacccaagcctaatgaaccccggggagatattttcctgccaaccatcggccatgcgctcgccctgattgctaccctggacaacggggacgttgtcggattgaacccagaggtcggccacgaacagatggcgaacctgaactatactcacggcctagctctggcgttgcactccggcaaactagtgcacattgacctcaatggacagaaagggttgaagtacgaccaggacttggtgtttggtcacggcgatttactcagcgctttcttcactgtggatttgctggtaaacggattcccggcctgccccgacgcgcctcgatacaccggaccgatacatttcgattacaaacccagccgcaccgaaggaatgcaaggcgtgtgggaatccgcacaagccaatatgcgcagctatctggccttggcagaaaaagccaaagccttccgcgccgaccccgaggtgcagacactcatgaaggaagcctcggtttacgaactgggcgaaccaactttggacaaagacgaaaacatcgaggactttctggccaaggatgaacccttcgatgtggaagcgaaagcacatcgtgaataccactttgtcaagctctatcagatggctattgaacatctagtgagctga

SEQ ID NO: 160 - protein, 392 aa, Mobiluncus mulieris
MVRNPTKADRFSFGIWTVGWTGTDPFGTDSRSSLDPWEYADKLAELGAWGITFHDNDVFPFNASETERNQRVKRLKDAADKAGLVIEMVTTNTFTHPVFKDGGLTSNDRAVRRFGLRKVLKNVDLAAEMGATTFVMWGGREGAEYDSSKDLYAAHARYAEGLDTVAAYIKQQGYNLKIGLEPKPNEPRGDIFLPTIGHALALIATLDNGDVVGLNPEVGHEQMANLNYTHGLALALHSGKLVHIDLNGQKGLKYDQDLVFGHGDLLSAFFTVDLLVNGFPACPDAPRYTGPIHFDYKPSRTEGMQGVWESAQANMRSYLALAEKAKAFRADPEVQTLMKEASVYELGEPTLDKDENIEDFLAKDEPFDVEAKAHREYHFVKLYQMAIEHLVS

SEQ ID NO: 161 - DNA, 1191 bp, Cellulomonas flavigena
atggttcgcaagcccacccctgaggacaggttctcgttcggtctgtggaccgtggcgtggaacggtcaggaccccttcggctccgccacccgcccgtggctcgacccggtcgagtccgtgcacaagctggccgagctcggcgcctcgcacgtgaccttccacgacgacgacgtcgtcccgttcggctcctcggacgccgaccgcgagaaggtcctcgacggcttccgtgcggcactggccgagaccggcatcacggtcgagatggtcaccaccaacaccttctcgcaccccgtgttcaaggacggcgcgttcacgtccaacgaccgccgcgtgcgccgctacgcgctgcgcaagatcctgcgcaacgtcgacctggccgcgtccctcgacgccgacacgttcgtcatgtggggcggccgcgagggcgccgagtacgactccgccaaggacctgtacgcggcgcaccaggcctacgccgacggcatcgacaccgtcgccgcctacatcaaggagaagggctacaagctgcgcatcgcgctcgagcccaagcccaacgagccccgcggcgacatcctgctcccgacgatcggccacgcgctgggcctcatcgccaagctcgagcacggcgacatcgtcggcctcaaccccgagacgggccacgagcagatggccggcctcaactacacgaccggcctcgcgcaggcgctgtgggcggacaagctgttccacatcgacctcaacggccagcgcggcatcaagtacgaccaggacctggtcttcggccacggtgacctgttctccgcgttcgcgaccgtcgacctcatcgagaacggcttcccgggcggcggcaccaagtacacgggccccgtgcacttcgactacaagccgtcgcgtaccgagagcttcgagggcgtctgggactcggcggccgccaacatggcgacctacatcatcctcaaggagcgtgcgatcgcgttccgccaggaccccgaggtccaggaggccgtggaggcggccggcgtcctcgagctcgccaagcccacgctgaacgagggcgagtcgctggccgacttcctcgcggaccgctccgcgttcgaggagttcgacgccgacgaggtcgccaagcacggcttcggcttcgtgcgcctcaaccagctcgcgctcgagcacgcgctcggcgcccgcggctga

SEQ ID NO: 162 - protein, 396 aa, Cellulomonas flavigena
MVRKPTPEDRFSFGLWTVAWNGQDPFGSATRPWLDPVESVHKLAELGASHVTFHDDDVVPFGSSDADREKVLDGFRAALAETGITVEMVTTNTFSHPVFKDGAFTSNDRRVRRYALRKILRNVDLAASLDADTFVMWGGREGAEYDSAKDLYAAHQAYADGIDTVAAYIKEKGYKLRIALEPKPNEPRGDILLPTIGHALGLIAKLEHGDIVGLNPETGHEQMAGLNYTTGLAQALWADKLFHIDLNGQRGIKYDQDLVFGHGDLFSAFATVDLIENGFPGGGTKYTGPVHFDYKPSRTESFEGVWDSAAANMATYIILKERAIAFRQDPEVQEAVEAAGVLELAKPTLNEGESLADFLADRSAFEEFDADEVAKHGFGFVRLNQLALEHALGARG

SEQ ID NO: 163 - DNA, 1170 bp, Saccharomonospora viridis
gtggtcggcaaacccgtggcagaggacaagttcagtttcggtctgtggacggtgggctggcgggccgccgatccgttcggtgacgcgacgaggcccgagctcgacgtggtcgagacggtgcacaagctggccgaactgggtgcgtggggagtgaccttccacgacaacgacctcattcccttcggcagtgacgagcgtgagcgcgagaagcggatcagccggttccggacggcgctcgacgagaccggactcgtggtgccgatggccaccaccaacctgttcacccaccccgtgttcaaggacggtgcgctcaccagcaacgaccgtgacatccgtcggttcgcgctgcgcaaggtgatgcgcaacatggatcttgcggccgaactcggcgcgacgacgtacgtgttgtggggcggtcgtgagggcagcgagacggacgcggccaaggacgtgcgtgccgcgatggaccgctatcgcgaagggatagacacgctcgcgcagtacgtcgtggagcaaggctacgggctgaggttggcgctggaacccaagccgaacgaaccgcgcggggacatcctgctgcccaccatcgggcatgcgctggcgttcatctccaccttggaacaccacgagatggtggggctcaaccccgaggtcggccacgagcagatggccgggctgaacttcgtgcacggcatcggccaggcgttgtggcagggcaagttgttccacattgacctcaacggccaacacggacctcggtacgaccaggacctcgtgttcggacacggcgacgtgctgtcggcgttctttttggtggacctgctcgaacacggcggatacgacggcccccgacacttcgactacaagccgccgcgtaccgaggacatcgacggtgtgtgggccagcgcggaggccaacatgcggtcgtatctgttgttgcgggagcgggcgaaggccttccgtgccgacccgcgggtgcaggaggcgctggaacgttcccgggtgccggaactggcgcagccgacgttggccgagggggagacggtgtccgatctcaaggccgatcgaaccgcgttcgaggagttcgacgtcgacgccgcggccgcccgcggctacgcctacgcccagttgtcacaactggccttcgaacatctcctgggcgcggcctaa

SEQ ID NO: 164 - protein, 389 aa, Saccharomonospora viridis
MVGKPVAEDKFSFGLWTVGWRAADPFGDATRPELDVVETVHKLAELGAWGVTFHDNDLIPFGSDEREREKRISRFRTALDETGLVVPMATTNLFTHPVFKDGALTSNDRDIRRFALRKVMRNMDLAAELGATTYVLWGGREGSETDAAKDVRAAMDRYREGIDTLAQYVVEQGYGLRLALEPKPNEPRGDILLPTIGHALAFISTLEHHEMVGLNPEVGHEQMAGLNFVHGIGQALWQGKLFHIDLNGQHGPRYDQDLVFGHGDVLSAFFLVDLLEHGGYDGPRHFDYKPPRTEDIDGVWASAEANMRSYLLLRERAKAFRADPRVQEALERSRVPELAQPTLAEGETVSDLKADRTAFEEFDVDAAAARGYAYAQLSQLAFEHLLGAA

SEQ ID NO: 165 - DNA, 1188 bp, Streptomyces lividans
atgaactaccagcccacttccgaggacaggttcacgttcggtttgtggacggtcggctggcagggcctggacccgttcggtgacgccaccagggaggccctggaccccgccgagtcggtacggcgtctgtcccagctgggtgcgtacggcgtcacgttccacgacgacgagctgatccccttcgggtcgagcgacaacgagcgcggagtcgcacacggagcgggagtcgcacatcaagcggttccggcaggcgctggacgcgaccggcatgaaggtgccgatggcgacgacgaacctgttcacgcacccgggtgttcaagggacggcgccttcacggcgaacgaccgggacgtgcgaggtacgcgctgcgcaagagcgatccgcaacatcgacctcgcggtcgagcatgtggcgcgagcgtctacgtgcgcctggggcggccgggagggtgcggagtccggcgcggccaaggacgtgcgggacgcgctcgaccggatgaaggaggccttcgacctgctgggcgagtacgtcaccgagcagggctacgacctgaagttcgcaatcgagccgaagcccaacgagccgcgcggtgacatcctgctcccgacggtcggacacgccctcgccttcatcgagcgcctcgagcggccggaactgtacggcgtgaacccggaggtcggccacgagcagatggccggcctgaacttcccccacggcatcgcccaggcgctgtgggcgggcaagctcttccacatcgacctcaacggccagtcgggcatcaagtacgaccaggacctgaggttcggcgcgggcgacctgcgggccgcgttctggctcgtcgacctgctggagcgggccgggtacgcgggtccgcggcacttcgacttcaagccgccgcggaccgagaacttcgacgccgtgtggccgtcggccgccggctgcatgcgcaactacctgatcctcaaggaccgggcggcggcattccgcgccgacccgcaggtgcaggaggcgctggccgcggcccggctggacgaactggcccgcccgaccgccgaggacggtctcgccgccctgctggccgaccggagcgcctacgacaccttcgacgtggacgcggccgccgcgcgaggcatggcgttcgagcacctcgaccagctcgccatggaccacctcctcggcgcccgctga

SEQ ID NO: 166 - protein, 395 aa, Streptomyces lividans
MNYQPTSEDRFTFGLWTVGWQGLDPFGDATREALDPAESVRRLSQLGAYGVTFHDDELIPFGSSDNERGVAHGAGVAHQAVPAGAGRDRHEGADGDDEPVHAPGCSRDGAFTANDRDVRGTRCARAIRNIDLAVEHVARASTCAWGGREGAESGAAKDVRDALDRMKEAFDLLGEYVTEQGYDLKFAIEPKPNEPRGDILLPTVGHALAFIERLERPELYGVNPEVGHEQMAGLNFPHGIAQALWAGKLFHIDLNGQSGIKYDQDLRFGAGDLRAAFWLVDLLERAGYAGPRHFDFKPPRTENFDAVWPSAAGCMRNYLILKDRAAAFRADPQVQEALAAARLDELARPTAEDGLAALLADRSAYDTFDVDAAAARGMAFEHLDQLAMDHLLGAR

SEQ ID NO: 167 - DNA, 1218 bp, Frankia sp.
atgccacgacagcccactcccgaggacaagttctccttcggcctgtggacggtcggctggaccggcaccgacccgttcggcctgccgacccggacggccctcgacccgtgggagtacgccgaccggctggccgagataggcgcctggggcatcaccctgcacgacaacgacgtcttccccttcgacgccgatgacgccgccgccgcgcgggcgtcccgccggctcaaggaggccaccgacgcctccggcctggtcatcgagatggtgaccacgaacaccttcacccatcccgtcttcaaggacggcggcctgacctcgaacgaccgcggcgtgcgccggttcggcctgcgcaaggtgctgcgcgcggtggatctcgcggcgcagctcggcgcgaccacgttcgtgatgtggggcggccgggagggcagcgagtacgacgggtcgaaggacgtcttcgccgcgctggagcgctaccgggagggcctggacaccgtcgccggctacatcaaaagccagggctacgacctgcggatcgcgctcgaacccaagccgaacgagccgcgcggcgacatcctcctgcccaccgtcgggcatgcgctggcgctgatcgccgagctggagaacggcgacatcgtcggggtcaacccggagaccgggcacgagcagatggccaacctcaactacacccacgcgctcggccaggcactgtggagcgggaagctgttccacatcgacctcaacgggcagcggggcctgaagtacgaccaggacctggtcttcgggcacggcgatctcgtctcggcgttcttcaccgtcgacctgctcgagaacggcttcccgggctacccggacggcccccggtacaccggtccccgccacttcgactacaagccgtcgcggacggagggcatggccggggtctgggagtcggcgcgggcgtgcatgtcgacctacctgctgctcgccgagaaggtggcggcgttccgcgccgatcccctcgtccaggaggcgatggcctacgccggcgtgttcgagctggccaagcccaccctcgcccccggcgagaccgcggccgatctcctggcctcggacgacggcttcgacccggccaaggcggccgagcgggacttcggtttcgtgcggctccagcaactggcgatcgagcatctcgtcggctcgcccgccccgggctcggcagccgcccgttccgccggctga

SEQ ID NO: 168 - protein, 405 aa, Frankia sp.
MPRQPTPEDKFSFGLWTVGWTGTDPFGLPTRTALDPWEYADRLAEIGAWGITLHDNDVFPFDADDAAAARASRRLKEATDASGLVIEMVTTNTFTHPVFKDGGLTSNDRGVRRFGLRKVLRAVDLAAQLGATTFVMWGGREGSEYDGSKDVFAALERYREGLDTVAGYIKSQGYDLRIALEPKPNEPRGDILLPTVGHALALIAELENGDIVGVNPETGHEQMANLNYTHALGQALWSGKLFHIDLNGQRGLKYDQDLVFGHGDLVSAFFTVDLLENGFPGYPDGPRYTGPRHFDYKPSRTEGMAGVWESARACMSTYLLLAEKVAAFRADPLVQEAMAYAGVFELAKPTLAPGETAADLLASDDGFDPAKAAERDFGFVRLQQLAIEHLVGSPAPGSAAARSAG

SEQ ID NO: 169 - protein, 1152 aa, Streptosporangium roseum
ATGAGCGACTACACGCCCAAGCCTGAGGACCGCTTCACCTTCGGGCTGTGGACCGTCGGCTGGCAGGCCCGTGACCAGTTCGGAGACGCGAGCCGTGCCCCGCTCGACCCGGTGGAGAGCGTCCACCGCCTCGCCGAGCTCGGCGCGTACGGCGTCACCTTCCACGACGACGACCTGCTGGCCGTCGAGCCGGACCGGGACAAGGCCGTCGAGCGTTTCAAGAAGGCCCTGGCCGAGACCGGCCTCAAGGTCCCCATGGCCACCACGAACCTGTTCACCCACCCCGTCTTCAAGGACGGCGGGTTCACCAGCAACGACCGCGACGTGCGCCGCTACGCCCTGCGCAAGGTGATGCGCAACGTCGACCTGGCAGCCGAGCTCGGCGCGACCACCTACGTCTGCTGGGGCGGCCGCGAGGGCGCCGAGTCAGGGGCCGCCAAGGACATCAGGGCCGCGCTCAGCCGTTACAAGGAGGGCATGGACCTGCTGACCTCCTACGTGATCGACCGGGGCTACGACATCAGGTTCGCCATCGAGCCCAAGCCGAACGAGCCGCGCGGCGACATCCTGCTCCCGACCGTCGGCCACGCGCTCGCCTTCATCAACGAGCTGGAGCACTCCGAGCGGGTCGGCCTCAACCCGGAGGTCGGCCACGAGGAGATGGCCGGGCTCAACTTCGCGCACGGCATCGCGCAGGCGCTCTGGCACGGCAAGCTCTTCCACATCGACCTCAACGGCCAGCACGGCCCCCGGTTCGACCAGGACCTCGTCTTCGGCCACGGCGACGTGAAGAACTCCTTCTTCCTGGTGGACCTGCTGGAGAACGGCGGCTACGACGGCCCCCGGCACTTCGACTACAAGCCGCTGCGCACCGAGGACGCCGAGGACGTCTGGGTCTCGGCCGCGGCCAACATGCGCACCTACCTGATCCTCAAGGAGAAGGTGAAGGCCTTCCACGCCGACCCCGAGGTCGTCGAGGCGCGCGCCGCCAGCAGGGTCGCCGAGCTGTCCGAGCCCACGCTGGCCCCCGGTGAGACGCTTGAGGACCTGCACCGCGACGACTTCGACGTCGACCGGGCCGCCGCGCGAGGCTTCCACTTCTCCCGGCTGAACCAGCTCGCCCTGGAGCACCTCCTCGGAGTCCGGGGATGA

SEQ ID NO: 170 - protein, 383 aa, Streptosporangium roseum
MSDYTPKPEDRFTFGLWTVGWQARDQFGDASRAPLDPVESVHRLAELGAYGVTFHDDDLLAVEPDRDKAVERFKKALAETGLKVPMATTNLFTHPVFKDGGFTSNDRDVRRYALRKVMRNVDLAAELGATTYVCWGGREGAESGAAKDIRAALSRYKEGMDLLTSYVIDRGYDIRFAIEPKPNEPRGDILLPTVGHALAFINELEHSERVGLNPEVGHEEMAGLNFAHGIAQALWHGKLFHIDLNGQHGPRFDQDLVFGHGDVKNSFFLVDLLENGGYDGPRHFDYKPLRTEDAEDVWVSAAANMRTYLILKEKVKAFHADPEVVEARAASRVAELSEPTLAPGETLEDLHRDDFDVDRAAARGFHFSRLNQLALEHLLGVRG

SEQ ID NO: 171 - DNA, 1164 bp, Nocardioides sp.
atgaccgagtcgagcttcagccccacgcgcgacgaccacttcaccttcggcctgtggaccgtggggtggcagggcgtcgacgtcttcggcaccgcgatccgcccggtcctcgagccggccgaggcgatccaccggctcagcgacctcggcgcgtacggcgtgacgttccacgacaacgacgtgttccccttcgacgcggacgccaccaccaaggagcagcacctcgcaccgttccgcaaggcgctcgaggagaccggcctggtggtccccatggtcaccacgaacctgttctcccacccggtgttccgcgacggcggcttcaccaacaaccaccgcgacgtacgccggttcgcgatccgcaaggccgccgaccagatcgatctggccgccgagctcggcgccaagatcttcgtcgcctggggcggccgcgagggagccgagtcgggggcggcgaaggacatcaagtcggcgctgtcgcgctacaaggaggccttcgacctgctcggcgcctacgtgctggagcagggctacgacctgcgcttcgcgatcgagcccaagcccaacgagccgcgcggcgacatcctgctgccgaccgtcggccacgccctggcgttcatcaacgagctcgagcaccccgagctggtcggcctcaaccccgaggtcgggcacgaggagatggcgtccctgaactacgcgcacggcctggcccaggcgctgtggcacggcaagctcttccacatcgacctcaacggccagcacggcccccgctacgaccaggacctccgcttcggcgccggcaacgcacgcggcgcgttctggaccgtcgacatcgtcgagaacggcggctacgagggcccgcggcacttcgactacaagccaccgcgcaccgaggacatggacggtgtctgggtctccgccgaggcgtgcatgcgcaactacctgatcctgcgcgagaaggtacgtgccttccgcgccgaccccgaggtgcagcaggccctgaaggacgcccgggtcgaccagctcgcggtcccgaccgtggccgccggcgagtcgctcgccgacctgcgcgccgaggcgttcgatcccgaccaggccgcccagcgtggcatgggcttcgagaagctcgaccagctcgccctggagcacctgtacggcgtgcgctga

SEQ ID NO: 172 - protein, 387 aa, Nocardioides sp.
MTESSFSPTRDDHFTFGLWTVGWQGVDVFGTAIRPVLEPAEAIHRLSDLGAYGVTFHDNDVFPFDADATTKEQHLAPFRKALEETGLVVPMVTTNLFSHPVFRDGGFTNNHRDVRRFAIRKAADQIDLAAELGAKIFVAWGGREGAESGAAKDIKSALSRYKEAFDLLGAYVLEQGYDLRFAIEPKPNEPRGDILLPTVGHALAFINELEHPELVGLNPEVGHEEMASLNYAHGLAQALWHGKLFHIDLNGQHGPRYDQDLRFGAGNARGAFWTVDIVENGGYEGPRHFDYKPPRTEDMDGVWVSAEACMRNYLILREKVRAFRADPEVQQALKDARVDQLAVPTVAAGESLADLRAEAFDPDQAAQRGMGFEKLDQLALEHLYGVR

SEQ ID NO: 173 - DNA, 1161 bp, Kribbella flavida
atgaccggttttaccccgagcaaggccgacaagttctccttcggcttgtggacggtcggctgggaaggcgtcgacgtcttcggtacggcggtccgcgcgccgctcgacccggtgctggcggtggagaagctggccgagctgggtgccgccgcgatctcgttccacgacgacgacctggtcccggacgacgcgcagcgccggcaggtgctcgagcggttcaccaaggcgctggccgacaccgggatggtggtcgagatggccaccacgaacctgttcgcccacccggtgttcaaggacggcggcctgaccgcgaacgaccgcgacgtccgccggtacgcgctcgcgaaggtgctgcgcaacgtcgacctggccgccgagctgggcgcgacgacgtacgtgctgtggggcggccgggagggctcggagtcgggcggttccaaggacgtcggcgccgcgctggaccggtacaaggagtcgatggacctgctcacgacgtacgtgcgcgagcagggctacgacctgcggttcgcactggagccgaagccgaacgagccgcgcggcgacatcttgctgccgacgatcgggcacgcgatcgcgttcatcaacgacctggagcaccccgagctggtcggcatcaaccccgaggtcgggcacgagcagatggcggggctgaactacgcccacggcatcgcccaggcgctgtggcacggcaagctgttccacatcgacctgaacgggcagcacgggccgcggttcgaccaggacctgcgcttcggcgccggcaacctgcgggaggcgttctggactgtggacgtgctgcagggctcgcagggccggcccgggtacgacgggtacgtgcacttcgactacaagccgccgcgcaccgaggacctggacggcgtctgggagaccgcgcgcggctgcatgcgcaactacctggtcctgcgggagaaggtggccgcgttccgggccgacccggaggtcgccgaggccctcgccgcggcgcgggtggccgacctgtccgagccgacgctcggcgcgggggagtcgctcgacgacctgcgcaaggcgtcgtacgacccggacgcgctggctcagcggggcctcgggttcgagcggctcgaccagctcgcgatggatcacctgctgggtattcgataa

SEQ ID NO: 174 - protein, 386 aa, Kribbella flavida
MTGFTPSKADKFSFGLWTVGWEGVDVFGTAVRAPLDPVLAVEKLAELGAAAISFHDDDLVPDDAQRRQVLERFTKALADTGMVVEMATTNLFAHPVFKDGGLTANDRDVRRYALAKVLRNVDLAAELGATTYVLWGGREGSESGGSKDVGAALDRYKESMDLLTTYVREQGYDLRFALEPKPNEPRGDILLPTIGHAIAFINDLEHPELVGINPEVGHEQMAGLNYAHGIAQALWHGKLFHIDLNGQHGPRFDQDLRFGAGNLREAFWTVDVLQGSQGRPGYDGYVHFDYKPPRTEDLDGVWETARGCMRNYLVLREKVAAFRADPEVAEALAAARVADLSEPTLGAGESLDDLRKASYDPDALAQRGLGFERLDQLAMDHLLGIR

SEQ ID NO: 175 - DNA, 1170 bp, Roseiflexus castenholzii
atgagcgacatgtacgaacccaaacccgaacacaagttcactttcggtctctggacggtcggcaatatcggacgtgacccgttcggcgagccggtgcgccatccgctctcgccggtcgagattgtccatctcctggcggatgtcggcgcgtatggcgtcaattttcacgataacgacctgattccgattgatgcaacgccagccgaccgtgatcgtatcctgcgtgagttcaaggcggcgttacaagaaaccgggcttgtcgtgcccatggcgacgacgaacctcttcgccgatccggtcttcaaggatggcgcatttacgtcaaacgacccaaaggtgcgcgcctatgcgctgcaaaagaccatgcgcgccatcgacctgggagtcgaatgcggcgcaaaggtgtatgtcttctggggcggacgcgagggagtggagagcgatgccgcaaaggacccgcaggaagggctgaagcgctatcgtgaggtaatcaactttctctgcgcctatgtcaaagatcaggggtacgacctgaaattcgcactcgaaccaaaaccgaacgagccgcgcggcgacatctacctggcgaccgtcgggcatgcactggcgttcatcaacacgctcgaccaccccgacatggtcgggctgaacccggaagtcgcgcacgaaacaatggcggggctgaacttcctgcacggcgttgcgcaggcatgggacgccggcaaactgttccatatcgacctgaacgatcaggtgatcgggcgctacgatcaggacttccgctttggcgcggtgaatctgaaagcagcgttctttctggtgcgcttcctggagaatgtcggttaccagggaagccgtcacttcgatgcgcacgcctaccgcactgaggattacgaaggggtcaagacgtttgcgcgcggctgtatgcgcacctacctgatcctgaaagaaaaggcgcgtcgtttcgacggggatgccgaaattcaggcgctgctcgcggaaatcacagctgacgacggcacgatggcgccgtttcagggtggctacagccgcgacaaggcggatgcactcaaggcgcatccgttcgatcgcgtcgcgttggggcggcgcgggctggcgtatgagcgtctcgaccaactgaccaacgagttgctgctgggtgtacgctaa

SEQ ID NO: 176 - protein, 389 aa, Roseiflexus castenholzii
MSDMYEPKPEHKFTFGLWTVGNIGRDPFGEPVRHPLSPVEIVHLLADVGAYGVNFHDNDLIPIDATPADRDRILREFKAALQETGLVVPMATTNLFADPVFKDGAFTSNDPKVRAYALQKTMRAIDLGVECGAKVYVFWGGREGVESDAAKDPQEGLKRYREVINFLCAYVKDQGYDLKFALEPKPNEPRGDIYLATVGHALAFINTLDHPDMVGLNPEVAHETMAGLNFLHGVAQAWDAGKLFHIDLNDQVIGRYDQDFRFGAVNLKAAFFLVRFLENVGYQGSRHFDAHAYRTEDYEGVKTFARGCMRTYLILKEKARRFDGDAEIQALLAEITADDGTMAPFQGGYSRDKADALKAHPFDRVALGRRGLAYERLDQLTNELLLGVR

SEQ ID NO: 177 - DNA, 1188 bp, Arthrobacter aurescens
atgaccccgcagcccaccccgcaggaccgcttcacctttggcctctggaccgtcggctggaccggcgccgatccgttcggcgtagccacccgcccggcgctggacccggtggaagcagtccacaagctcagcgagcttggcgcctacggcatcacgttccacgacaatgacctggtccccttcgacgccacggcgtccgagcgcgacctcatcctgaagaacttcaaggcagcgttggccgagaccggactgaagacgcccatggtcaccacaaacctgttcagccaccctgtgttcaaggatggcgggttcacctcgaacgaccgttccatccgccgctttgccctgagcaagatcctccggaacatcgatctcgctgctgaactgggtgccgagaccttcgtgatgtggggcggccgcgaaggcagcgaatacgacggctccaaggatctttccgcagccctggatcgcatgaaggaaggcgtggacaccgcggccggctacatcaaagagaagggctacggcctgcgcatcgcccttgagcccaagccgaacgaaccccgcggcgacatcttcctgcccaccgtgggccatggcctggcgttcatcgcacagctggaacacggcgacatcgtaggccttaacccggaaacgggccacgagcagatggccgggttgaacttcacccacggcattgcacaggccctgtgggcgggcaagctcttccacatcgacctcaacggccagcgcgggatcaagtacgatcaggaccttgttttcggccacggcgacctcaccagcgccttcttcaccgtggaccttctggagaatggcttccccaacggcggaccaaagtacgacggtccgcgccacttcgactacaagccctcccgcaccgatggttacgacggcgtgtgggaatcagccaagtccaacatgtccatgtacctcctgctgaaggaacgcgcactggccttccgcgcggaccccgaggttcaggaagcactcgccacctcaggcgtcttcgaactgggcgaacccacgttgaacgctggagagaccacggcggatctgctggccgacgccagcgccttcgacacgttcaacgccgatcaggccgccgagcgctcgttcgccttcgtccgcctcaaccagctggccatcgagcacctgctcggcgcccgctag

SEQ ID NO: 178 - protein, 395 aa, Arthrobacter aurescens
MTPQPTPQDRFTFGLWTVGWTGADPFGVATRPALDPVEAVHKLSELGAYGITFHDNDLVPFDATASERDLILKNFKAALAETGLKTPMVTTNLFSHPVFKDGGFTSNDRSIRRFALSKILRNIDLAAELGAETFVMWGGREGSEYDGSKDLSAALDRMKEGVDTAAGYIKEKGYGLRIALEPKPNEPRGDIFLPTVGHGLAFIAQLEHGDIVGLNPETGHEQMAGLNFTHGIAQALWAGKLFHIDLNGQRGIKYDQDLVFGHGDLTSAFFTVDLLENGFPNGGPKYDGPRHFDYKPSRTDGYDGVWESAKSNMSMYLLLKERALAFRADPEVQEALATSGVFELGEPTLNAGETTADLLADASAFDTFNADQAAERSFAFVRLNQLAIEHLLGAR

SEQ ID NO: 179 - DNA, 1155 bp, Leifsonia xyli
ttgctggctcgagcgcaggctccaccggagctgagcagccgcggcgcgacccggccaccgctcgacgtcgtggaggcggtgacgaggctgagcgagctgggcgcttatgggctcaccttccacgatgacgacctgttcgcgttcggctcggccgacgcggagcggcagaagcaaatcgaccggctgaagcaggcgctcgcggacaccgggatcatcgtgccgatggtcacaacgaatctgttcagcgccccggtgttcaaagacggcggcttcacctccaacgaccgcgccgtgcgccggttcgcgctgcggaaggcgctgaggaacctcgacctcgccgccgagctgggggcgcagacgttcgtgctgtggggtggccgcgaaggggcggagtacgactccgcgaaagaaatccggatggcgctggaacgctatcgcgaggccgtcgatctgctcggcgactatgtcaccggcaagggctacggcatccggttcgccctggagccgaagccgaacgagccgcgcggcgacattctgctcccgaccatcggccacgcgctcgcgttcatctcgtcgctggagcggccggagctggtggggctcaacccggaggtcgggcacgagcagatggccgggctcaacgccgccgccggagtcgctcaggcgctgtatcacagcaagctcttccacatcgacctcaatgggcagcgcggcgtcaagtacgaccaggatctggtgttcgggcatggcgatctgcagaacgccttcgccctggtcgacttgctggagaacggcggcccggcctacggcggcccggcctacgacggcccgcgccacttcgactcccagacgcccgcaccgaggacgtcgcgggcgtctgggagtcggcggccgcgaacatgcgcacctaacctgctgctgaaggagcgcgcggcgtcgttccgcgccgaccccgacgtgcaggaagcgctggccgcgtcgcgcgtcgcggagctgtcgcagccgacactcggcccgagcgagagctacggggacctgctggccgactgcagcgcgttcgaggacttcgacgcggacgcctatttcggtggcaggggcttcggcttcgtgcggcttcagcagctggccctcgagcatctgctcggcgcgcgctga

SEQ ID NO: 180 - protein, 384 aa, Leifsonia xyli
MLARAQAPPELSSRGATRPPLDVVEAVTRLSELGAYGLTFHDDDLFAFGSADAERQKQIDRLKQALADTGIIVPMVTTNLFSAPVFKDGGFTSNDRAVRRFALRKALRNLDLAAELGAQTFVLWGGREGAEYDSAKEIRMALERYREAVDLLGDYVTGKGYGIRFALEPKPNEPRGDILLPTIGHALAFISSLERPELVGLNPEVGHEQMAGLNAAAGVAQALYHSKLFHIDLNGQRGVKYDQDLVFGHGDLQNAFALVDLLENGGPAYGGPAYDGPRHFDSQTPAPRTSRASGSRRPRTCAPNLLLKERAASFRADPDVQEALAASRVAELSQPTLGPSESYGDLLADCSAFEDFDADAYFGGRGFGFVRLQQLALEHLLGAR

SEQ ID NO: 181 - DNA, 1179 bp, Jonesia denitrificans
atgacgcagcaggacatcaaatactccttcggtctgtggacaaccggatggcaaggccgcgaccagttcggtgacgccacccgtgcatttcgcagcccagccgacgacgtccgcaaacttgcggaactcggtgcgtggggtttcaccttccacgacgacgatgtcgtcccttttggttcagatgatgcaacccgcgccaagctcctcggcgaggtcaaggacgcagcgcaggaaacgggtctcaccatcgagatggtgaccaccaacctcttctcccaccccgtcttcaaagacggtggcgtcacatccaatgaccgctccgtgcgccgtttcgcgctgcgcaaggtgctccgcaacgtggacctgaccgcagaactgggcgccaaaaccttcgtcatgtggggtggccgtgaaggctccgagtacgacggtgccaaggacctccacgcagcccttgagcggtacaaggaaggtgtcgacctcatcgcggggtacatcaaggagaagggctacgacatcaagatcgcccttgagcctaagcccaacgaacctcgcggggacatcttcttgcccaccgttggtcacgcactcggcttcatcgcggaactcgaacacggggacatcgttggtttgaaccccgagactggtcacgagcaaatggctggcctcaactacactcacggtctggcacaggctctgtgggctgacaaactcttccacatcgacctcaacggtcagcgttccatcaagtttgaccaggaccttgtttttggtcacggagacttgttgtctgcgttcttcaccgtggacttggtggaaaacgggttccctgcctccccagacgctccccgctacaccggcccacgtcactttgactacaagccaagccgcaccgaagcggttgagggcgtgtgggactccgcaaaagccaacatggagacctacaaccttctggcggcgaaggccaaggcctaccgtgaggaccctgaggttaaggcagcaatggagcaggctggcctgtttgagctggcaacacccacccttgctgcaggtgaatcggtggctgaccttcttgctgacacatccgcgttcgaagacttcgacgctgatgcagcagcggagcgttccttcgggttcgtgcgcctcaaccagcttgcgatcaagcacctgattggctga

SEQ ID NO: 182 - protein, 392 aa, Jonesia denitrificans
MTQQDIKYSFGLWTTGWQGRDQFGDATRAFRSPADDVRKLAELGAWGFTFHDDDVVPFGSDDATRAKLLGEVKDAAQETGLTIEMVTTNLFSHPVFKDGGVTSNDRSVRRFALRKVLRNVDLTAELGAKTFVMWGGREGSEYDGAKDLHAALERYKEGVDLIAGYIKEKGYDIKIALEPKPNEPRGDIFLPTVGHALGFIAELEHGDIVGLNPETGHEQMAGLNYTHGLAQALWADKLFHIDLNGQRSIKFDQDLVFGHGDLLSAFFTVDLVENGFPASPDAPRYTGPRHFDYKPSRTEAVEGVWDSAKANMETYNLLAAKAKAYREDPEVKAAMEQAGLFELATPTLAAGESVADLLADTSAFEDFDADAAAERSFGFVRLNQLAIKHLIG

SEQ ID NO: 183 - DNA, 1167 bp, Streptomyces olivaceoviridis
atgagctaccagcccacccccgaggacaggttcacgttcggactctggaccgtcggctggcagggaagggacccgttcggcgacgccacccgccgcgccctcgacccggtcgagacggtgcagcgcctggcggaactcggtgcccacggagtgaccttccacgacgacgacctgatccccttcggttcgtcggacaccgagcgcgagtcgcacatcaagcggttccgccaggccctggacgccaccggcatgaccgttccgatggccaccacgaacctcttcacgcaccccgtcttcaaggacggcgcgttcacggccaacgaccgcgacgtgcgccgctacgccctccgcaagacgatccgcaacatcgacctggcggccgagctgggcgcgaagacgtacgtcgcctggggtggccgcgagggcgccgagtccggtgccgccaaggacgtgcgttccgccctggaccgcatgaaggaggccttcgacctcctcggcgagtacgtcacctcgcagggctacgtcctccgcttcgccatcgagcccaagccgaacgagccccgcggcgacatcctgctgcccaccgtcgggcacgcgctggccttcatcgagcgcctggagcggcccgagctctacggcgtcaaccccgaggtcggccacgagcagatggccggcctgaacttcccgcacggcatcgcgcaggccctgtgggccgggaagctgttccacatcgacctcaacggccagtccggcatcaagtacgaccaggacctgcggttcggcgcgggcgacctgcggtccgcgttgtggatggtcgacctcctggagagcgccggttacgaaggaccgcgccacttcgacttcaagccgccgcggaccgaggacctcgacggcgtgtgggcctcggcagcgggctgcatgcgcaactacctcattctgaaggagcgcgcggcagccttccgtgccgaccccgaggtgcaggaggcgctgcgcgcctcgcgcctggaccagctggcccagccgaccgcggccgacggcctggaggacctgctcgccgaccgcgcggccttcgaggacttcgacgtggaggccgccgccgcgcgcggcatggccttcgaacgcctcgaccagctggcgatggaccacctgctgggcgcgcggggctga

SEQ ID NO: 184 - protein, 388 aa, Streptomyces olivaceoviridis
MSYQPTPEDRFTFGLWTVGWQGRDPFGDATRRALDPVETVQRLAELGAHGVTFHDDDLIPFGSSDTERESHIKRFRQALDATGMTVPMATTNLFTHPVFKDGAFTANDRDVRRYALRKTIRNIDLAAELGAKTYVAWGGREGAESGAAKDVRSALDRMKEAFDLLGEYVTSQGYVLRFAIEPKPNEPRGDILLPTVGHALAFIERLERPELYGVNPEVGHEQMAGLNFPHGIAQALWAGKLFHIDLNGQSGIKYDQDLRFGAGDLRSALWMVDLLESAGYEGPRHFDFKPPRTEDLDGVWASAAGCMRNYLILKERAAAFRADPEVQEALRASRLDQLAQPTAADGLEDLLADRAAFEDFDVEAAAARGMAFERLDQLAMDHLLGARG

SEQ ID NO: 185 - DNA, 1173 bp, Stackebrandtia nassauensis
atgagcgacaagtacacacccgtgccggacgacaagttctccttcgggatctggacggtcggctgggccgcccaggacgtgttcggccccgcgacccgcgcccccatgcccgccgaccgcgcggtccacaaactcgccgagatcggcgcctacggggtcaatttccacgacaacgacgtgttcgacttcgacgaccccgaaaccgtccgcgacgccaagatcgccgccttccgcaaggccctcgacgcgaccggcctcaaggtcaccaccgccaccacgaacctgttcagccacccgatcttcaaggacggcgccttcacccacaacgaccgcgacgtgcgccgcttcgccctcgccaaggtcatgcgcaacctcgacctggccgccgaactgggagccggggtctacgtgtgctggggcggccgcgaaggcgcggaatccggcggcgccaagaacatccaggccgccctcgaccggatgaaggaagccttcgacatcctcggggcctacgtcaccgaccagggctacgacacccgcttcgccatcgaacccaaacccaacgagccgcgcggccacatcctcctgcccaccgtcggccacgccctggccttcatcaacgaactcgaatactccgaccgggtcggcgtcaaccccgagatcggccacgaggagatggccggactcgactacgccgccggaatccgccaagccctgtggcacggcaaactgttccacatcgacctcaacggccagaccggtccccgctacgaccaggacctgcgcttcggcgcgggcaacgtcggcggcgccttctgggccgtcgacgccatcgaggagggcatcgccaacggccagtactccggcccgatccacttcgacttcaaacccccacgcaccgaggacgacgacggcgtctgggtcgccgcggccgcctgcatgcgcaactacaagatcctgcgcgacaaggtccacacattccgctccgacccacgggtacgagaagccctcgaagccgcgcgggtcgaccaactcaccgtcccgaccctggccaagggcgaaacctgggcctccataaaagacctcacggtcgacgtcgcgggtctggccgcccggggcatggccttcgaacgactcgaccagctggccctggaacacctctacggcgtcgggtag

SEQ ID NO: 186 - protein, 390 aa, Stackebrandtia nassauensis
MSDKYTPVPDDKFSFGIWTVGWAAQDVFGPATRAPMPADRAVHKLAEIGAYGVNFHDNDVFDFDDPETVRDAKIAAFRKALDATGLKVTTATTNLFSHPIFKDGAFTHNDRDVRRFALAKVMRNLDLAAELGAGVYVCWGGREGAESGGAKNIQAALDRMKEAFDILGAYVTDQGYDTRFAIEPKPNEPRGHILLPTVGHALAFINELEYSDRVGVNPEIGHEEMAGLDYAAGIRQALWHGKLFHIDLNGQTGPRYDQDLRFGAGNVGGAFWAVDAIEEGIANGQYSGPIHFDFKPPRTEDDDGVWVAAAACMRNYKILRDKVHTFRSDPRVREALEAARVDQLTVPTLAKGETWASIKDLTVDVAGLAARGMAFERLDQLALEHLYGVG

SEQ ID NO: 187 - DNA, 1164 bp, Thermus thermophilus
gtgtacgagcccaaaccggagcacaggtttacctttggcctttggactgtgggcaatgtgggccgtgatcccttcggggacgcggttcgggagaggctggacccggtttacgtggttcataagctggcggagcttggggcctacggggtaaaccttcacgacgaggacctgatcccgcggggcacgcctcctcaggagcgggaccagatcgtgaggcgcttcaagaaggctctcgatgaaaccggcctcaaggtccccatggtcaccgccaacctcttctccgaccctgctttcaaggacggggccttcacgagcccggacccttgggttcgggcctatgccttgcggaagagcctggagaccatggacctgggggcagagcttggggccgagatctacgtggtctggccgggccgggagggagctgaggtggaggccacgggcaaggcccggaaggtctgggactgggtgcgggaggcgctgaacttcatggccgcctacgccgaggaccagggatacgggtaccggtttgccctcgagcccaagcctaacgagccccggggggacatttacttcgccaccgtggggagcatgctcgcctttattcataccctggaccggcccgagcgcttcggcctgaaccccgagttcgcccacgagaccatggccgggcttaactttgtccacgccgtggcccaggctctcgacgccgggaagcttttccacattgacctcaacgaccaacggatgagccggtttgaccaggacctccgcttcggctcggagaacctcaaggcggcctttttcctggtggacctcctggaaagctccggctaccagggcccccgccactttgacgcccacgccctgcgtaccgaggacgaagaaggggtttgggccttcgcccgaggctgcatgcgtacctacctgatcttaaaggaaagggctgaagccttccgcgaggatcccgaggtcaaggagcttcttgccgcttactatcaagaagatcctgcggccttggcccttttgggcccctactcccgcgagaaggccgaagccctcaagcgggcggagcttcccctcgaggccaagcggcgccggggttatgccctggaacgcctggaccagctggcggtggagtacctcctgggggtgcgggggtga

SEQ ID NO: 188 - protein, 387 aa, Thermus thermophilus
MYEPKPEHRFTFGLWTVGNVGRDPFGDAVRERLDPVYVVHKLAELGAYGVNLHDEDLIPRGTPPQERDQIVRRFKKALDETGLKVPMVTANLFSDPAFKDGAFTSPDPWVRAYALRKSLETMDLGAELGAEIYVVWPGREGAEVEATGKARKVWDWVREALNFMAAYAEDQGYGYRFALEPKPNEPRGDIYFATVGSMLAFIHTLDRPERFGLNPEFAHETMAGLNFVHAVAQALDAGKLFHIDLNDQRMSRFDQDLRFGSENLKAAFFLVDLLESSGYQGPRHFDAHALRTEDEEGVWAFARGCMRTYLILKERAEAFREDPEVKELLAAYYQEDPAALALLGPYSREKAEALKRAELPLEAKRRRGYALERLDQLAVEYLLGVRG

SEQ ID NO: 189 - DNA, 1158 bp, Acidobacteria bacterium
atgtctgatgcttaccagccgcgaccggaacacaagttctcgttcggcctttggacgatcgcgaaccgcggccgcgatcctttcggcgatgcagtgcgccccactatccctccgaacgacattgtcgctttgctccgcgaggtaggcgcatggggggtcaatcttcacgataacgatcttgttccaattgacgcgacgccatccgagcgcgacaagatcgtccgcgattttcaggcggcctgcaggcagcacggcatcgtcgtgccgatggcgacggtcaacttgttcttcgatccaatcttcaaagatggagctttcaccgcaaacgacgccgatgtgcgtgcgtacgctcttcagaagacgatgcgcgctatggatctcggcgccgagttaggcgctaagctctttgtgctctggggtgggcgcgaaggaactgagactgatgcgtgccgccgtcccgaagaacccttcaagcggttgcgcgaagccatcgattatttgtgcgaatacaatctcgacaaaaagtatggtttcaaatttgcgttggaggccaagccaaacgaacctcgcggcgacatatacatgccgacgactggtgcctatctcggtttcatcccaacccttgcgcatccggagatggttggtgtaaatcctgaggtcgcgcacgagcacatggcgggattgaacgcgcttcacgcggttgcgcaagcatgggaagcgggcaaactcttccacatcgatctaaacgatcagaaccctgggcgctatgaccaggattttcgttttgcatctgcaaccccaaaatcaatgttctggttggtgaagttccttgaagactcggggtatcaagggccgcgccactttgacgcgcacgcttacaggacagaagacatcgccggcgtaaaggattttgcgcgcggatgcatgcgaagctacctgatcctgaaggaaaaggcgcagcgctggaatgccgacaaggagatccagcaaatcttctccgagatcaacccgcaaaccaccggcagctcgaaatattcacacgatggcgctctgtctcttctcaaccgcacctatgatcgcgcagccattgcgaagcgcggcctgcaatacgagcgcctcgatcagctgactatggaactgttgtggggaatacggtaa

SEQ ID NO: 190 - protein, 385 aa, Acidobacteria bacterium
MSDAYQPRPEHKFSFGLWTIANRGRDPFGDAVRPTIPPNDIVALLREVGAWGVNLHDNDLVPIDATPSERDKIVRDFQAACRQHGIVVPMATVNLFFDPIFKDGAFTANDADVRAYALQKTMRAMDLGAELGAKLFVLWGGREGTETDACRRPEEPFKRLREAIDYLCEYNLDKKYGFKFALEAKPNEPRGDIYMPTTGAYLGFIPTLAHPEMVGVNPEVAHEHMAGLNALHAVAQAWEAGKLFHIDLNDQNPGRYDQDFRFASATPKSMFWLVKFLEDSGYQGPRHFDAHAYRTEDIAGVKDFARGCMRSYLILKEKAQRWNADKEIQQIFSEINPQTTGSSKYSHDGALSLLNRTYDRAAIAKRGLQYERLDQLTMELLWGIR

SEQ ID NO: 191 - DNA, 1170 bp, Catenulispora acidiphila
atgaccgtcgcaccgtcccccgctgacaaattcaccttcggcctgtggaccgtgggctggcaggcccaggatccgttcggcgacccgacccgccccgcgctggacccggtggagaccgtccaccggctcgccgagctcggcgcctacggcgtcaccttccacgacgacgacctcatcccgttcggctccgccgacgacgagcgcgccaagcacatcgcccgcttccgcgaggccctggacgccaccggcctgaaggtgccgatggcgaccaccaacctgttcaagcacccggtcttcaaggacggcgcgttcaccagcaacgaccgcgacgtccgccgctacgcgctgcgcaaggtcatgcgcaacctggacctggccgccgaactcggcgcggacacctacgtcttctggggcggccgcgagggctcggagtccgacgccgccaaggacgtgcgcgccgcgctggaccgctaccgcgagggtctggacatgctggccgcctacgtcaccgaccgcggctacggcatccgcttcgccctggagcccaagcccaacgagccccgcggcgacatcctgctgccgaccatcggccacgccctgggcttcatcagcaccctggagcacgccgacatggtcgggctcaaccccgaggtcgggcacgagcagatggccggcctgaacttcgcccacggcatcgcgcaggcgctgtggcagggcaagctgttccacatcgacctcaacggccagcgcggcatcaagttcgaccaggacctggtcttcggccacggcgacctgctcaacgccttcttcctggtggacctgctggagaccggcggctacgaagggccgcggcacttcgactacaagccctcccgcaccgaggacatcaccggcgtctggcagtccgccgccgcgaacatgagcacctacctgctgctcaaggagcgcgccgcggccttccgcgccgaccccgaggtcgtcgaggcgcgcgccgcggcccgcgtggacgacctggggacgccgaccctcgccgccggcgagacctacgccgacctgctcgccgaccgcaccgccttcgaggacttcgaccccgaggaggccgccgagcgcggtctcggcgcggtccgcctgacccaactcgccgtcgagcacctgatgggcgcgcggtga

SEQ ID NO: 192 - protein, 389 aa, Catenulispora acidiphila
MTVAPSPADKFTFGLWTVGWQAQDPFGDPTRPALDPVETVHRLAELGAYGVTFHDDDLIPFGSADDERAKHIARFREALDATGLKVPMATTNLFKHPVFKDGAFTSNDRDVRRYALRKVMRNLDLAAELGADTYVFWGGREGSESDAAKDVRAALDRYREGLDMLAAYVTDRGYGIRFALEPKPNEPRGDILLPTIGHALGFISTLEHADMVGLNPEVGHEQMAGLNFAHGIAQALWQGKLFHIDLNGQRGIKFDQDLVFGHGDLLNAFFLVDLLETGGYEGPRHFDYKPSRTEDITGVWQSAAANMSTYLLLKERAAAFRADPEVVEARAAARVDDLGTPTLAAGETYADLLADRTAFEDFDPEEAAERGLGAVRLTQLAVEHLMGAR

SEQ ID NO: 193 - DNA, 1167 bp, Streptomyces corchorusii
atgagctaccagcccacccccgaggacaggttcacgttcggactctggaccgtcggctggcagggaagggacccgttcggcgacgccacccgccgcgccctcgacccggtcgagacggtgcagcgcctggcggaactcggtgcccacggagtgaccttccacgacgacgacctgatccccttcggttcgtcggacaccgagcgcgagtcgcacatcaagcggttccgccaggccctggacgccaccggcatgaccgtcccgatggccaccacgaacctcttcacgcaccccgtcttcaaggacggcgcgttcacggccaacgaccgcgacgtgcgccgctacgccctccgcaagacgatccgcaacatcgacctggcggccgagctgggcgcgaagacgtacgtcgcctggggtggccgcgagggcgccgagtccggcgccgccaaggacgtgcgttccgccctggaccgcatgaaggaggccttcgacctcctcggcgagtacgtcacctcgcagggctacgacctccgcttcgccatcgagcccaagccgaacgagccccgcggcgacatcctgctgcccaccgtcgggcacgcgctggccttcatcgagcgcctggagcggcccgagctctacggcgtcaaccccgaggtcggccacgagcagatggccggcctgaacttcccgcacggcatcgcgcaggccctgtgggccgggaagctgttccacatcgacctcaacggccagtccggcatcaagtacgaccaggacctgcggttcggcgcgggcgacctgcggtccgccttctggctggtcgacctcctggagagcgccggttacgaaggaccgcgccacttcgacttcaagccgccgcggaccgaggacctcgacggcgtgtgggcctcggcggcgggctgcatgcgcaactacctcatcctgaaggagcgcgcggcagccttccgcgccgaccccgaggtgcaggcggcgctgcgcgcctcgcgcctggaccagctggcccagccgaccgcggccgacggcctggaggacctgctcgccgaccgcgcggccttcgaggacttcgacgtggaggccgccgccgcgcgcggcatggccttcgaacgcctcgaccagctggcgatggaccacctgctgggcgcgcggggctga

SEQ ID NO: 194 - protein, 388 aa, Streptomyces corchorusii
MSYQPTPEDRFTFGLWTVGWQGRDPFGDATRRALDPVETVQRLAELGAHGVTFHDDDLIPFGSSDTERESHIKRFRQALDATGMTVPMATTNLFTHPVFKDGAFTANDRDVRRYALRKTIRNIDLAAELGAKTYVAWGGREGAESGAAKDVRSALDRMKEAFDLLGEYVTSQGYDLRFAIEPKPNEPRGDILLPTVGHALAFIERLERPELYGVNPEVGHEQMAGLNFPHGIAQALWAGKLFHIDLNGQSGIKYDQDLRFGAGDLRSAFWLVDLLESAGYEGPRHFDFKPPRTEDLDGVWASAAGCMRNYLILKERAAAFRADPEVQAALRASRLDQLAQPTAADGLEDLLADRAAFEDFDVEAAAARGMAFERLDQLAMDHLLGARG

SEQ ID NO: 195 - DNA, 1167 bp, Streptomyces thermocyaneoviolaceus
atgaactaccagcccacccccgaggacaggttcaccttcggcctgtggaccgtcggctggcaggggcgggaccccttcggcgacgccacgcgtcccgccctcgacccggtcgaggcggtgcagcggctggccgaactgggcgcctacggagtgaccttccacgacgacgacctgatccccttcgggtcgtccgacgccgagcgcgaggcgcacgtcaagcggttccgtcaggctctcgacgcgaccggtatgaccgtcccgatggccaccaccaacctcttcacccaccccgtcttcaaggacggcgcgttcaccgccaacgaccgcgacgtgcgccgttacgccctgcgcaagaccatccggaacatcgacctcgcggtcgagctgggcgccaaggtctacgtcgcctggggcggccgcgagggcgcggagtccggtgccgccaaggacgtgcgtgcggccctggaccgcatgaaggaggccttcgacctgctcggcgagtacgtcacctcgcagggctacgacatccggttcgccatcgagcccaagcccaacgagccgcgcggcgacatcctgctgcccaccatcggccacgcgctcgccttcatcgagcgcctggagcgccccgagctgtacggcgtcaaccccgaggtgggccacgagcagatggccggcctgaacttcccgcacggcatcgcgcaggccctgtgggcgggcaagctcttccacatcgacctcaacggtcagtccggcatcaagtacgaccaggacctgcgcttcggcgccggtgacctgcgcgccgccttctggctggtcgacctgctggagagcgccggctgggagggtccgcgccacttcgacttcaagcccccgcggaccgaggacatcgacggcgtgtgggcctccgcggccggctgcatgcgcaactacctcatcctgaaggagcgcgccgccgccttccgggccgacccggaggtccaggaggccctgcgtgctgcccggctcgaccagctcgccgagcccaccgcggccgacggcctgcaggccctgctggccgaccgcaccgcgtacgaggacttcgacgtggacgcggccgccgcgcgcggcatggccttcgagcgcctcgaccagctcgccatggaccacctgctgggcgcccggggctga

SEQ ID NO: 196 - protein, 388 aa, Streptomyces thermocyaneoviolaceus
MNYQPTPEDRFTFGLWTVGWQGRDPFGDATRPALDPVEAVQRLAELGAYGVTFHDDDLIPFGSSDAEREAHVKRFRQALDATGMTVPMATTNLFTHPVFKDGAFTANDRDVRRYALRKTIRNIDLAVELGAKVYVAWGGREGAESGAAKDVRAALDRMKEAFDLLGEYVTSQGYDIRFAIEPKPNEPRGDILLPTIGHALAFIERLERPELYGVNPEVGHEQMAGLNFPHGIAQALWAGKLFHIDLNGQSGIKYDQDLRFGAGDLRAAFWLVDLLESAGWEGPRHFDFKPPRTEDIDGVWASAAGCMRNYLILKERAAAFRADPEVQEALRAARLDQLAEPTAADGLQALLADRTAYEDFDVDAAAARGMAFERLDQLAMDHLLGARG

SEQ ID NO: 197 - DNA, 1191 bp, marine actinobacterium
atgcctacacaacccacacccgccgacaagttctccttcgggctctggaccatcggctacaacggagccgaccccttcggaggcccaacccgcgcccctctcgatgtcgttcacggcgttgaaaagctcgccgagctcggtgcctacggcctcaccttccacgacgatgatctcttcgcctttggatctacggatgccgaacgccagaagcaaatcgaccgcctcaagcaagtactcagcgacaccggtctcatcgtgccaatggtcaccactaacctcttcagcgctcccgttttcaaagacggcggcttcacttccaacgaccgcggcgttcgtcgtttcgctatgcgcaaagcaatgcgtcaactggaactcggtgtagagctcggcgccaagacgttcgtcatgtggggcggccgcgagggcgcagagtacgactccgctaaagacgtgcgctccgccctcgaacgctaccgcgaagccctcaacctgtttggtgactacgtcactgaaaaggactacgacatccgcttcgctattgagcccaagcccaacgagccccgcggcgacatcctgctacccaccgtcggtcacgccattgcattcattgagaccctcgaacgccccgaactgttcggcgtgaaccccgaagtcggtcacgagcagatggctggcctgaactttacatcgggcatcgcccaagctctctaccaagacaagctcttccacatcgacctcaacggtcagcgtggaatcaagtacgaccaagacctcgttttcgggcacggcgacctccacaacgcgttctcgctcgtcgatctgctcgaaaatggtggccccaacggcggccagagctacaccggtcctcgtcacttcgattacaagcccagccgcaccgaagacgagaccggcgtctgggattccgctgccgccaacatgcgcacctacctgctactcaaggagcgtgcagcagccttccgcgccgaccccgatgtgcaagaagccctgcaagctgcgcgcgtcttcgaactggccgagaacaccctcggcgagaatgaaagctatgacgacctgttggcagaccgcgcctcgtacgaagacttcgaccacggggcctatttcaacggcaagggcttcggctttgttcgcctgcagcagctcgcaaccgagcacctcatgggcgcccgctaa

SEQ ID NO: 198 - protein, 396 aa, marine actinobacterium
MPTQPTPADKFSFGLWTIGYNGADPFGGPTRAPLDVVHGVEKLAELGAYGLTFHDDDLFAFGSTDAERQKQIDRLKQVLSDTGLIVPMVTTNLFSAPVFKDGGFTSNDRGVRRFAMRKAMRQLELGVELGAKTFVMWGGREGAEYDSAKDVRSALERYREALNLFGDYVTEKDYDIRFAIEPKPNEPRGDILLPTVGHAIAFIETLERPELFGVNPEVGHEQMAGLNFTSGIAQALYQDKLFHIDLNGQRGIKYDQDLVFGHGDLHNAFSLVDLLENGGPNGGQSYTGPRHFDYKPSRTEDETGVWDSAAANMRTYLLLKERAAAFRADPDVQEALQAARVFELAENTLGENESYDDLLADRASYEDFDHGAYFNGKGFGFVRLQQLATEHLMGAR

SEQ ID NO: 199 - DNA, 1251 bp, Micromonospora sp.
atggcaccccgtcccacccccgccgacaagttctccttcggcctctggacggtgggctggcaggcccgtgacccgttcggcgacgccacccgccccgagctggacgccgtcgaggcggtgcacaagctcgccgagttgggcgcgtacgggatcaccttccacgacgacgacctgatcccgttcggcgcggacgccgccgcccgcgacgcccagctcgcccggttccgcaaggccctcgacgagaccggcctggtcgtcccgatggtcaccaccaacctcttcacccacccggtgttcaaggacggcggcttcaccagcaacgaccgcgacgtgcgccggtacgcgctgcgcaaggtgctgcgcaacgtcgacctggccgccgagctgggcgcgaagacgttcgtcatgtggggcggccgggagggcgccgagtacgacgtggccaaggacatccgctcggcgctggaccgctaccgcgaggccgtcgacctgctctgccagtacgtcgtcgactccggctacgacctgcgcttcgccatcgagccgaagccgaacgagccgcgcggcgacatcctgctgcccaccgtcggtcacgcgttggcgttcatctccaccctggcccgcccggagatggtgggcctcaaccccgaggtcggccacgagcagatggccgggctcaacttcacccacggcatcgcccaggcgctctggcagggcaagctgttccacatcgacctcaacggccagcgcggcatcaagtacgaccaggacctggtcttcggccacggcgacctgatgaacgcgttcgccctggtggacctgctggagaacggcggccccgacggcggccccgcctacgacggcccccggcacttcgactacaagccgtcgcgcaccgaggacttcaccggcgtgtgggcctcggccgaggcgaacatgcgcacctacctgctgctcaaggagcgggccgcagcgttccgggccgacccggaggtggccgaggccctcgcggcgagccgcgtcggcgacctggccgtgccgaccgtcgcgcccggtgagagctacgccgacctgctcgccgaccgctccgccttcgaggagtacgacgtcgatgccgcggccgcgcgcggcttccacttcgtccggctcaaccagcttgccgtcgagcacgtgctcgggcgcccgctgaggccgccgccatgcctctggtcgccgggttcgactcgtccacccagtcgtgcaagctggtga

SEQ ID NO: 200 - protein, 416 aa, Micromonospora sp.
MAPRPTPADKFSFGLWTVGWQARDPFGDATRPELDAVEAVHKLAELGAYGITFHDDDLIPFGADAAARDAQLARFRKALDETGLVVPMVTTNLFTHPVFKDGGFTSNDRDVRRYALRKVLRNVDLAAELGAKTFVMWGGREGAEYDVAKDIRSALDRYREAVDLLCQYVVDSGYDLRFAIEPKPNEPRGDILLPTVGHALAFISTLARPEMVGLNPEVGHEQMAGLNFTHGIAQALWQGKLFHIDLNGQRGIKYDQDLVFGHGDLMNAFALVDLLENGGPDGGPAYDGPRHFDYKPSRTEDFTGVWASAEANMRTYLLLKERAAAFRADPEVAEALAASRVGDLAVPTVAPGESYADLLADRSAFEEYDVDAAAARGFHFVRLNQLAVEHVLGRPLRPPPCLWSPGSTRPPSRASW

SEQ ID NO: 201 - DNA, 1158 bp, Thermobifida fusca
atgagcaactaccagcccacacccgaggaccggttcagcttcggactgtggactgtgggatggcgcggccacaacaccttcggcaaggccgtacgcccgcaactcgaccccgtcgacgtcgtctggaaactccgcgaactcggcgcctacggcatcaccttccacgacgacgacctcctcccgccggacagcacccccgcggaacgcgacgccatcatcaaacgcttcacccgggcgctcgaagagagcggcatgaccgtccccatggtcactaccgacctcttcagccaccccgtcttccgcgacggcggcttcacctccaacagccgcgacgtgcgccgctacgccctgcgcaaggtcatgcgcaacatcgaccgcgccgcggaactcggcgcccgcacctacgtgtgctggggcggcatggacggcgccgaatacgaacccgccaagaacatctccgccgcgctcgaccgcctgcgcgaagccttcaacatcctgtgcgaatacgtccgcagcaagggctacaacctgcggttcgccctcgaacccaaacccaacgagccccgcggcgacatcctcctgcccaccatcggccacgccatcgccttcatcaacgagctcgaccaccccgaaatggtcggcctcaaccccgaagtcggccacgaacagatggccggactcaacttcacccacggcatcgcccaagccctctggcacggcaaactgttccacatcgacctcaacggccagcgcggcatcaaatacgaccaggacctgcgcttcggcgccggcgacgtgcgcgacgcgttcttcctcgtcaacctgctggaaagcagtggctacgacggaccgcgccacttcgacttcaagaccccgcgcaccgaagacgtcgacggcgtgtgggaagcggcacgcaactgcatgcgcaactacctcatcttcaaggagaaggctgaagcgttccgcgccgaccccgaagtccgcgaagccatggaagccgcccgggtcttcgaactggagcagtccaccctcgccgaaggggagaccctggacgacctgctcgccgaagacatcaacctggacgaagtggcccagcgcggctaccacttcgaacgcctcgaccagctcgccctcgactacctcctgggcgtgcgctaa

SEQ ID NO: 202 - protein, 385 aa, Thermobifida fusca
MSNYQPTPEDRFSFGLWTVGWRGHNTFGKAVRPQLDPVDVVWKLRELGAYGITFHDDDLLPPDSTPAERDAIIKRFTRALEESGMTVPMVTTDLFSHPVFRDGGFTSNSRDVRRYALRKVMRNIDRAAELGARTYVCWGGMDGAEYEPAKNISAALDRLREAFNILCEYVRSKGYNLRFALEPKPNEPRGDILLPTIGHAIAFINELDHPEMVGLNPEVGHEQMAGLNFTHGIAQALWHGKLFHIDLNGQRGIKYDQDLRFGAGDVRDAFFLVNLLESSGYDGPRHFDFKTPRTEDVDGVWEAARNCMRNYLIFKEKAEAFRADPEVREAMEAARVFELEQSTLAEGETLDDLLAEDINLDEVAQRGYHFERLDQLALDYLLGVR

SEQ ID NO: 203 - DNA, 1149 bp, Herpetosiphon aurantiacus
atgacacagcataaatttagctttggattatggacagttggcaatgttgggcgtgacccatttggtgaaccagtgcgcaaaaccctctcgccagttgagattgtgcatttgttggctgaagttggagcatggggcgtaaattttcacgataacgatttagtgccgattgatgctagtgccagccaaaaagcccaaattattgccgatttcaaacaagcactcaaggataccggcttggttgtgccgatggcaaccaccaatttattcggtcacccagcctttaaagatggcgcatttaccagcaacgatccggctgtgcgggcttatgccttgcaaaaaaccatggcagccatggatttgggcgctgaatttggcgcgaaaacctatgtgttttggggtggccgtgaaggcagcgaaaccgatgcctcgaaaaatctgctcgaaggcttgaagtggttccgcgaagcgctcaacttcttgtgcgactatagcaatgcccaaggctatggctatcgttttgccttggaagccaagcccaacgaaccacgcggcgatatcttcttgcctaccaccggagccatgttgggctttattcagaccctcgatcagcccgagatggtgggggtaaatcccgaagttgcccatgaaaccatggcaggcttgaattttacccatgccgtggcccaagcgcttgatgctggcaaactgttccatatcgacctcaacgatcaaaatagtggtcgctacgaccaagattatcgctttggagcacaaaactacaaacaaagctttttcttggtgaaattgctgcaagatgctggctacgatggcccattgcacttcgatgctcacgcttaccgcagcgaagatcttgagggagttaaagattttgcccgtggttgtatgcgtacctaccaaattttggccgaaaaagttcagcgcttcaatgctgatgctgaaattcaagccttgttagctcaaatcaacgccccaaatgccgatgttgagcaattccgtggtggctacacgccagaacgtgccgctgcgctcaaagcctatcaatttgatcgtcaagcacttggcgaacgcggcctcggctacgaaaagcttgatcaactaaccttcgagttgttgatgggagccagatag

SEQ ID NO: 204 - protein, 382 aa, Herpetosiphon aurantiacus
MTQHKFSFGLWTVGNVGRDPFGEPVRKTLSPVEIVHLLAEVGAWGVNFHDNDLVPIDASASQKAQIIADFKQALKDTGLVVPMATTNLFGHPAFKDGAFTSNDPAVRAYALQKTMAAMDLGAEFGAKTYVFWGGREGSETDASKNLLEGLKWFREALNFLCDYSNAQGYGYRFALEAKPNEPRGDIFLPTTGAMLGFIQTLDQPEMVGVNPEVAHETMAGLNFTHAVAQALDAGKLFHIDLNDQNSGRYDQDYRFGAQNYKQSFFLVKLLQDAGYDGPLHFDAHAYRSEDLEGVKDFARGCMRTYQILAEKVQRFNADAEIQALLAQINAPNADVEQFRGGYTPERAAALKAYQFDRQALGERGLGYEKLDQLTFELLMGAR

SEQ ID NO: 205 - DNA, 1167 bp, Streptomyces griseus
atgacggaacgcttcacccccactcccgaggacaagttcagcttcggcctgtggaccgtgggctggcagggccgggatcccttcggggacgccacccgcgcggccatcgaccccgtggagtcggtgcggcggctcgctgagctgggagcctggggggtgaccttccacgacgacgacctgatccccttcggggcgccggaggccgagcgcgagaggatcgtcaagcgcttccgcaaggcggtcgacgacagcggtctcgtcgtgcccatggtgacgacgaacctcttcacccaccccgtcttcaaggacggcggattcaccgccaacgaccggggggtgcgccggtacgcactccgcaagaccctgcgcaacatcgacctcgccgtcgagctgggggcgacgaccttcgtggcgtggggcggccgcgagggggccgagtccggcggggcgaaggacgtccgcctcgccctccaccggatgaaggaggccttcgacctgctgggcgagtacgtcgtcgagcagggctacgacctccgtttcgccgtcgagcccaagccgaacgagccgcgcggcgacatcctgctgccgaccatcggccacgccctggccttcatcgagcgcctggagcgtcccgagctggtcggcgtcaacccggagaccggccacgagcagatggccgggctcaacttcccgcacggcatcgcccaggccatgtgggcggacaagctcttccacatcgacctcaacggccagtccggcatcaagtacgaccaggacctgcgcttcggcgcgggcgatctgcggcaggcgttctggctcgtcgacctgttggagagcggctacgaaggcccccgccacttcgacttcaagcccccgcgcaccgaggaccacgacggtgtctgggcctcggcggcgggctgcatgcgcaactacctcatcctcaaggagcgcgccgcagccttccgcgccgaccccgaggtgcgggctgcccttcgcgcgtcccgcctggacgaactggcccgccccaccgcaggcgacgggctggcgggcctgctcgccgaccgcaacgcctacgaggacttcgacgtggacgccgccgcggaacgcggcatggccttcgaggcgctggaccagctcgccatggaccacctgctcgccgtgcgctga

SEQ ID NO: 206 - protein, 388 aa, Streptomyces griseus
MTERFTPTPEDKFSFGLWTVGWQGRDPFGDATRAAIDPVESVRRLAELGAWGVTFHDDDLIPFGAPEAERERIVKRFRKAVDDSGLVVPMVTTNLFTHPVFKDGGFTANDRGVRRYALRKTLRNIDLAVELGATTFVAWGGREGAESGGAKDVRLALHRMKEAFDLLGEYVVEQGYDLRFAVEPKPNEPRGDILLPTIGHALAFIERLERPELVGVNPETGHEQMAGLNFPHGIAQAMWADKLFHIDLNGQSGIKYDQDLRFGAGDLRQAFWLVDLLESGYEGPRHFDFKPPRTEDHDGVWASAAGCMRNYLILKERAAAFRADPEVRAALRASRLDELARPTAGDGLAGLLADRNAYEDFDVDAAAERGMAFEALDQLAMDHLLAVR

SEQ ID NO: 207 - DNA, 1224 bp, Mycobacterium vanbaalenii
atgaccgtgctggagtccagccgccccgttcccgacgccctgagcccgagacgcgaggacaagttctcgttcggcctctggacggtcggatggcccggcgtcgacccgttcggcgtcgccacccgtccggcgctcgacgccatcgaggccgtggatcggctggccgcactgggcgcctacggcttgacgttccacgacgacgacctcttcgcgttcggcagctccgatggcgagcgccggcgggccatcgatcggctgacctccgcgttgagcgccaacggtctggtcgttccgatggtgaccaccaacctgttcactcaaccggtcttcaaggacggcggcttcaccagcaacgaccgcgcggtgcgtcgcttcgcgctgcgcaaggtgctgcgcaacctcgatctggccgccgaactcggtgcccagaccttcgtgatgtggggcggccgtgagggcggcgaatacgactcggccaaagacgtgcaggcggcgctggaacgctatcgcgaggcgctggatgtgctgtgccagtacgtgatcgaccagggcagcggaatccgcttcgcgatcgagccgaaacccaacgaaccccggggcgacatcctgctgccgacggtcggtcacgctctcgcgttcatcgagacccttgcccatccggagatggtcggggtcaaccccgagaccgggcacgagcagatgtccgggttgaacttcacgcacggcatcgcccaagccctgtacagcggcaagcttttccacatcgacctgaacgggcagcgcggtatcaagttcgaccaggacctggtgttcgggcacggagacctggtcaacgccttctcgctggtggatctgctcgagcacggtggacccgacggtggtccggcctatgacggccctcggcatttcgactacaagccgagtcgcaccgaggacgccgaaggggtatgggcgtcggccgcggccaacatgcggatgtatctgctgctgcggcagcgcgccgcggccttccgcgccgatcccgacgtgcgtgaggcgatggtcgccgccaaggtggccgaactgcgcaagccgacgctggcggccggggagacctacgccgacctgctgaacgaccggtccgcctacgaggaattcgacaccggcgcctatttcggtggaaagggttgcggcttcgtggctctgcaccagttggccgtcgagcacctgatgggggcgcggtga

SEQ ID NO: 208 - protein, 407 aa, Mycobacterium vanbaalenii
MTVLESSRPVPDALSPRREDKFSFGLWTVGWPGVDPFGVATRPALDAIEAVDRLAALGAYGLTFHDDDLFAFGSSDGERRRAIDRLTSALSANGLVVPMVTTNLFTQPVFKDGGFTSNDRAVRRFALRKVLRNLDLAAELGAQTFVMWGGREGGEYDSAKDVQAALERYREALDVLCQYVIDQGSGIRFAIEPKPNEPRGDILLPTVGHALAFIETLAHPEMVGVNPETGHEQMSGLNFTHGIAQALYSGKLFHIDLNGQRGIKFDQDLVFGHGDLVNAFSLVDLLEHGGPDGGPAYDGPRHFDYKPSRTEDAEGVWASAAANMRMYLLLRQRAAAFRADPDVREAMVAAKVAELRKPTLAAGETYADLLNDRSAYEEFDTGAYFGGKGCGFVALHQLAVEHLMGAR

SEQ ID NO: 209 - DNA, 1167 bp, Streptomyces diastaticus
atgagctaccagcccacccccgaggacaagttcacgttcggcctgtggaccgtcggctggcagggacgggaccccttcggcgacgccacccgcggcgccctcgacccggccgagtccgtccgccgcctcgccgagctcggcgcccacggcgtgacgttccacgacgacgacctcatccccttcggcgcgacggacagcgagcgcgccgagcacatcaagcggttccgccaggggctggacgagaccggcatgaaggtcccgatggcgaccaccaacctgttcacccacccggtgtttaaggacggcggcttcaccgcgaacgaccgtgacgtgcgccgttacgccgtgcgcaagaccatccgcaacatcgacctcgcggtcgagctcggcgcgcagacctacgtcgcctggggcggccgcgagggcgccgagtccggcgccgccaaggacgtccgggtcgccctcgaccgcatgaaggaggctttcgacctcctcggcgagtacgtcacctcccagggctacgacactccgttcgccatcgagcccaagccgaacgagccccgcggcgacatcctcctgccgacgatcggccacgccctcgccttcatcgacggcctcgagcgcccggagctgtacggcgtcaacccggaggtcggccacgagcagatggccgggctcaacttcccgcacggcatcgcccaggccctgtgggcgggcaagctgttccacatcgacctcaacggccagtccggcatcaagtacgaccaggacctccgcttcgggccgggcgacctggccgccgcgttctggctggtggacctgctggagtcggccggctacgagggcccgcgccacttcgacttcaagccgccgcggaccgaggacttcgacggcgtctgggcctccgcggccggctgcatgcgcaactacctgatcctcaaggagcgcgcggccgccttccgtgcggacccggaggtgcaggaggcgctgcgcgcggcccggctggacgagctcgcccagccgacggcgggcgacggcctccaggccctgctgcccgaccgctcggcgttcgaggacttcgacccggacgcggcggcggcccgtggcatggccttcgagcggctggaccagctggcgatggaccacctgctgggcgcgcggggctag

SEQ ID NO: 210 - protein, 388 aa, Streptomyces diastaticus
MSYQPTPEDKFTFGLWTVGWQGRDPFGDATRGALDPAESVRRLAELGAHGVTFHDDDLIPFGATDSERAEHIKRFRQGLDETGMKVPMATTNLFTHPVFKDGGFTANDRDVRRYAVRKTIRNIDLAVELGAQTYVAWGGREGAESGAAKDVRVALDRMKEAFDLLGEYVTSQGYDTPFAIEPKPNEPRGDILLPTIGHALAFIDGLERPELYGVNPEVGHEQMAGLNFPHGIAQALWAGKLFHIDLNGQSGIKYDQDLRFGPGDLAAAFWLVDLLESAGYEGPRHFDFKPPRTEDFDGVWASAAGCMRNYLILKERAAAFRADPEVQEALRAARLDELAQPTAGDGLQALLPDRSAFEDFDPDAAAARGMAFERLDQLAMDHLLGARG

SEQ ID NO: 211 - DNA, 1212 bp, Deinococcus geothermalis [sequence omitted]

SEQ ID NO: 212 - protein, 403 aa, Deinococcus geothermalis
MPDYTPTPADKFTFGLWTVGQTGRDPFGEATRPGFSAPYIVQKLAELGAYGVNLHDNDLVPIDATPQQRDRIVAEFKQALSDHGLVVPMATTNLFTDPVFKDGAFTSADARVRAYALQKTMQSMDLGHELGAQTYVFWGGREGTEVDASSKLLDALAWFRDSLNFLAEYSQSQGYGYRFALEPKPNEPRGDIFFPTAGSMLGFIATLDQPDLFGVNPEFAHDTMAGLNFTHAVAQVIDAGKLFHIDLNDQKMGRFDQDLRFGAENLKTAFFLVKLLEDSGYDGPRHFDAHALRTEDEEGVWAFARGCMRTYLILKEKAQQFDEDPEIQAALAAYRVDDEELSRLTAKFSPENAKALKARTFDRELLGRRGPGLEQLDQLTVELLLGLRGHTSTTTHPEIEVTR

SEQ ID NO: 213 - DNA, 1188 bp, Arthrobacter sp.
atgactcttcagcccaccccagcagaccgcttcaccttcggcctttggaccgtcggctggaccggggcggatcctttcggggtcgccacccgccctgccctggaccccgtcgaggccgtccacaagctcagcgaactgggcgcttacggcatcaccttccatgacaatgacctggtcccgttcgacgcaacggcttccgagcgcgagctgatcctgaagaacttcaaggccgccctcgccgagacgggcctcaagacccccatggtcaccaccaacctgttcagccatcctgtcttcaaggacggcggctttacctccaatgaccggtccgtccgccggttcgcgctcagcaaggtccttcagaacatcgaccttgcagccgagctgggtgcggagaccttcgtcatgtggggcgggcgcgaaggcagcgagtatgacggttccaaggacctctctgccgcgctggaccggatgaaggaaggcgtggacacggccgcggcttacatcaaggacaaggggtacggccttcggatcgccctggaaccgaagcccaacgagccccgcggcgacatcttcctgcccaccgtcggccacggactggccttcatcgcgcagctggaacacggcgacatcgtgggcctcaacccggaaaccgggcacgagcagatggccggactgaacttcacccatggcatcgcccaggcgctgtgggccggcaagctcttccacatcgacctcaacggccagcgcggcatcaagtacgaccaggacctcgtgttcgggcacggcgacctcaccagcgcattcttcaccgtggacctgctcgaaaacggcttccccaacggcggtccgaagtatgacggcccgcgtcacttcgactacaagccctcacgcaccgacggatacgacggcgtctgggaatccgcgaaatccaacatgtccatgtacctcctcctgaaggagcgcgccctggccttccgcgccgaccccgatgtccaggaagccctgaagacctccggtgtcttcgaactcggcgagcccacccttgccgccggagagaccacggcggatttgctggctgacgcttccgcgttcgcggagttcgacgccgatgccgccgcccagcggtcattcgccttcgtccgcctcaaccagctggccatcgagcacctgctcggcgcccgctag

SEQ ID NO: 214 - protein, 395 aa, Arthrobacter sp.
MTLQPTPADRFTFGLWTVGWTGADPFGVATRPALDPVEAVHKLSELGAYGITFHDNDLVPFDATASERELILKNFKAALAETGLKTPMVTTNLFSHPVFKDGGFTSNDRSVRRFALSKVLQNIDLAAELGAETFVMWGGREGSEYDGSKDLSAALDRMKEGVDTAAAYIKDKGYGLRIALEPKPNEPRGDIFLPTVGHGLAFIAQLEHGDIVGLNPETGHEQMAGLNFTHGIAQALWAGKLFHIDLNGQRGIKYDQDLVFGHGDLTSAFFTVDLLENGFPNGGPKYDGPRHFDYKPSRTDGYDGVWESAKSNMSMYLLLKERALAFRADPDVQEALKTSGVFELGEPTLAAGETTADLLADASAFAEFDADAAAQRSFAFVRLNQLAIEHLLGAR

SEQ ID NO: 215 - DNA, 1167 bp, Streptomyces rubiginosus
atgaactaccagcccacccccgaggacaggttcaccttcggactgtggaccgtcggctggcagggacgggaccccttcggtgacgccacgcggcgcgccctcgacccggtcgagtcggtgcggcggctggccgagctgggcgcccacggcgtcacgttccacgacgacgacctcatccccttcggctccagcgacagcgagcgcgaggagcacgtcaagcggttccggcaggcgctggacgacaccggcatgaaggtgccgatggccaccaccaacctgttcacccacccggtgttcaaggacggcggcttcaccgccaacgaccgcgacgtgcgccgctacgccctgcgcaagaccatccgcaacatcgacctcgcggtcgagctcggcgccgagacctatgtggcctggggcggccgcgagggtgccgagtcgggtggcgccaaggacgtgcgggacgccctcgaccgcatgaaggaggccttcgacctgctcggcgagtacgtcacctcccagggctacgacatccgcttcgccatcgagcccaagccgaacgagccgcgcggcgacatcctgctccccaccgtcggccacgccctggcgttcatcgagcgcctggagcgaccggagctgtacggcgtgaaccccgaggtcggccacgagcagatggccgggctgaacttcccgcacggcatcgcgcaggcgctgtgggcgggcaagctgttccacatcgacctcaacggccagaacggcatcaagtacgaccaggacctccgcttcggcgcgggcgacctgcgggccgcgttctggctggtggacctgctggagtcggccggctacagcggcccgcggcacttcgacttcaagccgccgcggaccgaggacttcgacggggtgtgggcctcggcggccggctgcatgcgcaactacctgatcctcaaggagcgtgcggcggccttccgcgccgaccccgaggtgcaggaggcgctgcgcgcgtcccgtctggacgagctggcccggcccacggcggccgacggtctgcaggccctgctcgacgaccggtccgccttcgaggagttcgacgtcgacgcggcggcggcccgtgggatggccttcgagcgcctggaccagctggcgatggaccacctgctgggcgcccggggctga

SEQ ID NO: 216 - protein, 388 aa, Streptomyces rubiginosus
MNYQPTPEDRFTFGLWTVGWQGRDPFGDATRRALDPVESVRRLAELGAHGVTFHDDDLIPFGSSDSEREEHVKRFRQALDDTGMKVPMATTNLFTHPVFKDGGFTANDRDVRRYALRKTIRNIDLAVELGAETYVAWGGREGAESGGAKDVRDALDRMKEAFDLLGEYVTSQGYDIRFAIEPKPNEPRGDILLPTVGHALAFIERLERPELYGVNPEVGHEQMAGLNFPHGIAQALWAGKLFHIDLNGQNGIKYDQDLRFGAGDLRAAFWLVDLLESAGYSGPRHFDFKPPRTEDFDGVWASAAGCMRNYLILKERAAAFRADPEVQEALRASRLDELARPTAADGLQALLDDRSAFEEFDVDAAAARGMAFERLDQLAMDHLLGARG

SEQ ID NO: 217 - DNA, 1164 bp, Streptomyces murinus
atgagcttccagcccacccccgaggacaggttcaccttcggtctgtggaccgtcggctggcagggaagggacccgttcggcgacgccacccgccccgccctcgacccggtcgagacggtgcagcgcctggccgagctgggcgcctacggagtgaccttccacgacgacgacctgatccccttcgggtcctccgacaccgagcgcgagtcgcacatcaagcgcttccgccaggccctggacgccaccggcatgacggtgcccatggccaccaccaacctcttcacccaccccgtcttcaaggacggcggcttcaccgccaacgaccgcgacgtacgccggtacgcgctgcgcaagacgatcggcaacatcgacctggcggccgaactgggtgccaagacgtatgtcgcctggggcggccgtgagggcgccgagtccggtggcgccaaggacgtgcgcgacgccctcgaccgcatgaaggaggcgttcgacctcctcggcgagtacgtcaccgcccagggctacgacctccgcttcgccatcgagcccaagcccaacgagccccgcggcgacatcctgctgcccaccgtcggccacgccctggccttcatcgagcgcctggagcgcccggagctgtacggcgtcaacccggaggtcggccacgagcagatggccggcctgaacttcccgcacggcatcgcgcaggccctgtgggcgggcaagctcttccacatcgacctcaacggccagtccggcatcaagtacgaccaggacctgcggttcggcgccggcgacctgcgggcggcgttctggctggtcgacctcctggagaccgccggttacgagggcccgcggcacttcgacttcaagccgccgcggaccgaggacttcgacggcgtgtgggcctcggccgcgggctgcatgcgcaactacctgatcctcaaggaccgtgcggccgccttccgtgccgacccggaggtgcaggaggcgctgcgtgccgcgcgtctggaccagctggcccagccgaccgcggccgacggccttgacgccctgctcgccgaccgcgcggcgttcgaggacttcgacgtcgatgccgccgccgcgcgcggtatggcgttcgagcacctcgaccagctggcgatggaccacctgctgggcgcgcgcggc

SEQ ID NO: 218 - protein, 388 aa, Streptomyces murinus
MSFQPTPEDRFTFGLWTVGWQGRDPFGDATRPALDPVETVQRLAELGAYGVTFHDDDLIPFGSSDTERESHIKRFRQALDATGMTVPMATTNLFTHPVFKDGGFTANDRDVRRYALRKTIGNIDLAAELGAKTYVAWGGREGAESGGAKDVRDALDRMKEAFDLLGEYVTAQGYDLRFAIEPKPNEPRGDILLPTVGHALAFIERLERPELYGVNPEVGHEQMAGLNFPHGIAQALWAGKLFHIDLNGQSGIKYDQDLRFGAGDLRAAFWLVDLLETAGYEGPRHFDFKPPRTEDFDGVWASAAGCMRNYLILKDRAAAFRADPEVQEALRAARLDQLAQPTAADGLDALLADRAAFEDFDVDAAAARGMAFEHLDQLAMDHLLGARG

SEQ ID NO: 219 - protein, 387 aa, Thermus caldophilus
MYEPKPEHRFTFGLWTVGNVGRDPFGDAVRERLDPVYVGHKLAELGVHGVNLHDEDLIPRGTPPQERDQIVRRFKRALDETGLKVPMVTGNLFSDPGFKDGGFTSRDPWVRAYAFRKSLETMDLGAELGAEIYVVWPGREGAEVEATGKARKVWDWVREPLNFMAAYAEDQGYGYRFALEPKPNEPRGDIYFATVGSMLALIHTLERPERFGLNPEFAHETMAGLNFVHAVAQALDAGKLLHIDLNGQRMNRFDQDLRFGSENLKAAFLLVDLLESSGYQGPRHFDAHALRTEDEEGVWAFARGCMRTYLILKERAEAFREDPEVKELLAAYYQEDPAALPLMDPYSHEKAEALKRAELPLEAKRHRGYALERLDQLAVEYLLGVRG

SEQ ID NO: 220 - protein, 387 aa, Thermus caldophilus
MYEPKPEHRFTFGLWTVGNVGRDPFGDAVRERLDPVYVGHKLAELGVHGVNLHDEDLIPRGTPPAERDQIVRRFKRALDETGLKVPMVTGNLFSDPGFKDGGFTSRDPWVRAYAFRKSLETMDLGAELGAEIYVVWPGREGAEVEATGKARKVWDWVREPLNFMAAYAEDQGYGYRFALEPKPNEPRGDIYFATVGSMLALIHTLERPERFGLNPEFAHETMAGLNFVHAVAQALDAGKLLHIDLNGQRMNRFDQDLRFGSENLKAAFLLVDLLESSGYQGPRHFDAHALRTEDEEGVWAFARGCMRTYLILKERAEAFREDPEVKELLAAYYQEDPAALPLMDPYSHEKAEALKRAELPLEAKRHRGYALERLDQLAVEYLLGVRG

SEQ ID NO: 221 - protein, 393 aa, Arthrobacter sp.
VQPTPADHFTFGLWTVGWTGADPFGVATRANLDPVEAVHKLAELGAYGITFHDNDLIPFDATAAEREKILGDFNQALADTGLKVPMVTTNLFSHPVFKDGGFTSNDRSIRRFALAKVLHNIDLAAEMGAETFVMWGGREGSEYDGSKDLAAALDRMREGVDTAAGYIKDKGYNLRIALEPKPNEPRGDIFLPTVGHGLAFIEQLEHGDIVGLNPETGHEQMAGLNFTHGIAQALWAEKLFHIDLNGQRGIKYDQDLVFGHGDLTSAFFTVDLLENGFPNGGPKYTGPRHFDYKPSRTDGYDGVWDSAKANMSMYLLLKERALAFRADPEVQEAMKTSGVFELGETTLNAGESAADLMNDSASFAGFDAEAAAERNFAFIRLNQLAIEHLLGSR

SEQ ID NO: 222 - protein, 393 aa, Actinoplanes missouriensis
SVQATREDKFSFGLWTVGWQARDAFGDATRTALDPVEAVHKLAEIGAYGITFHDDDLVPFGSDAQTRDGIIAGFKKALDETGLIVPMVTTNLFTHPVFKDGGFTSNDRSVRRYAIRKVLRQMDLGAELGAKTLVLWGGREGAEYDSAKDVSAALDRYREALNLLAQYSEDRGYGLRFAIQPKPNEPRGDILLPTAGHAIAFVQELERPELFGINPETGHEQMSNLNFTQGIAQALWHKKLFHIDLNGQHGPKFDQDLVFGHGDLLNAFSLVDLLENGPDGAPAYDGPRHFDYKPSRTEDYDGVWESAKANIRMYLLLKERAKAFRADPEVQEALAASKVAELKTPTLNPGEGYAELLADRSAFEDYDADAVGAKGFGFVKLNQLAIEHLLGAR

SEQ ID NO: 223 - protein, 387 aa, Streptomyces olivochromogenes
MSYQPTPEDRFTFGLWTVGWQGRDPFGDATRPALDPVETVQRLAELGAHGVTFHDDDLIPFGSSDTERESHIKRFRQALDATGMTVPMATTNLFTHPVFKDGGFTANDRDVRRYALRKTIRNIDLAVELGAKTYVAWGGREGAESGAAKDVRVALDRMKEAFDLLGEYVTSQGYDTRFAIEPKPNEPRGDILLPTVGHALAFIERLERPELYGVNPEVGHEQMAGLNFPHGIAQALWAGKLFHIDLNGQSGIKYDQDLRFGAGDLRAAFWLVDLLESAGYEGPRHFDFKPPRTEDIDGVWASAAGCMRNYLILKERAAAFRADPEVQEALRASRLDELAQPTAADGVQELLADRTAFEDFDVDAAAARGMAFERLDQLAMDHLLGAR

SEQ ID NO: 224 - protein, 386 aa, Streptomyces olivochromogenes
  misc_feature (386)..(386): Xaa can be any naturally occurring amino acid
SYQPTPEDRFTFGLWTVGWQGRDPFGDATRPALDPVETVQRLAELGAHGVTFHDDDLIPFGSSDTERESHIKRFRQALDATGMTVPMATTNLFTHPVFKDGGFTANDRDVRRYALRKTIRNIDLAVELGAKTYVAWGGREGAESGAAKDVRVALDRMKEAFDLLGEYVTSQGYDIRFAIEPKPNEPRGDILLPTVGHALAFIERLERPELYGVNPEVGHEQMAGLNFPHGIAQALWAGKLFHIDLNGQSGIKYDQDLRFGAGDLRAAFWLVDLLESAGYEGPRHFDFKPPRTEDIDGVWASAAGCMRNYLILKERAAAFRADPEVQEALRASRLDELAQPTAADGVQELLADRTAFEDFDVDAAAARGMAFERLDQLAMDHLLGAX

SEQ ID NO: 225 - protein, 394 aa, Streptomyces rochei
MSFQPTPEDKFTFGLWTVGWQGRDPFGDATRPGLDPVETVQRLAELGAYGVTFHDDDLNPFGSSDTERESHIKRFRQALDATGMTVPMATTNLFTHPVFKDRFTANDRDVRAYAVRKTIRNIDLAAELGAKTYVAWGGREGAESGGAKDVRDALDRMKEAFDLLGEYVTAQGYDLRFAIEPKPNEPRGDILLPTVGHALAFIERLERPELYGVNPEVGHEQMAGLNFPHGIAQALWAGKLFHIDLNGQSGIKYDQDCGSRRRPAGGVLVVDLLESAGYEGPRHFDFKPPRTEDFDGVWASAEGCMRNYLILKQPRPPSAPTRRCRRRASAPRVWTSWPSRPLADGLEALLADRTAFEDFDVEAAAARGMVRTPRPAGDGPPAGRARLTVAPRKR

SEQ ID NO: 226 - protein, 386 aa, Streptomyces olivochromogenes
  misc_feature (386)..(386): Xaa can be any naturally occurring amino acid
SYQPTPEDRFTFGLWTVGWQGRDPFGDATRPALDPVETVQRLAELGAHGVTFHDDDLIPFGSSDTERESHIKRFRQALDATGMTVPMATTNLFTHPVFKDGGFTANDRDVRRYALRKTIRNIDLAVELGAKTYVAWGGREGAESGAAKDVRVALDRMKEAFDLLGEYVTSQGYDTRFAIKPKPNEPRGDILLPTVGHALAFIERLERPELYGVNPEVGHEQMAGLNFPHGIAQALWAGKLFHIDLNGQSGIKYDQDLRFGAGDLRAAFWLVDLLESAGYEGPRHFDFKPPRTEDIDGVWASAAGCMRNYLILKERAAAFRADPEVQEALRASRLDELAQPTAADGVQELLADRTAFEDFDVDAAAARGMAFERLDQLAMDHLLGAX

SEQ ID NO: 227 - protein, 387 aa, Streptomyces diastaticus
SYQPTPEDKFTFGLWTVGWQGRDPFGDATRGALDPAESVRRLAELGAHGVTFHDDDLIPFGATDSERAEHIKRFRQALDETGMKVPMATTNLFTHPVFKDGGFTANDRDVRRYALRKTIRNIDLAVELGAQTYVAWGGREGAESGAAKDVRVALDRMKEAFDLLGEYVTSQGYDTPFAIEPKPNEPRGDILLPTIGHALAFIDGLERPELYGVNPEVGHEQMAGLNFPHGIAQALWAGKLFHIDLNGQSGIKYDQDLRFGPGDLRAAFWLVDLLESAGYEGPRHFDFKPPRTEDFDGVWASAAGCMRNYLILKERAAAFRADPEVQEALRAARLDELAQPTAGDGLQALLPDRSAFEDFDPDAAAARGMAFERLDQLAMDHLLGARG

SEQ ID NO: 228 - protein, 393 aa, Actinoplanes missouriensis
SVQATREDKFSFGLWTVGWQARDAFGDATRTALDPVEAVHKLAEIGAYGITFHDDDLVPFGSDAQTRDGIIAGFKKALDETGLIVPMVTTNLFTHPVFKDGGFTSNDRSVRRYAIRKVLRQMDLGAELGAKTLVLWGGREGAEYDSAKDVSAALDRYREALNLLAQYSEDRGYGLRFAIEPKPNEPRGDILLPTAGHAIAFVQELERPELFGINPETGHEQMSNLNFTQGIAQALWHKKLFHIDLNGQHGPRFDQDLVFGHGDLLNAFSLVDLLENGPDGAPAYDGPRHFDYKPSRTEDYDGVWESAKANIRMYLLLKERAKAFRADPEVQEALAASKVAELKTPTLNPGEGYAELLADRSAFEDYDADAVGAKGFGFVKLNQLAIEHLLGAR

SEQ ID NO: 229 - protein, 394 aa, Arthrobacter sp.
SVQPTPADHFTFGLWTVGWTGADPFGVATRKNLDPVEAVHKLAELGAYGITFHDNDLIPFDATEAEREKILGDFNQALKDTGLKVPMVTTNLFSHPVFKDGGFTSNDRSIRRFALAKVLHNIDLAAEMGAETFVMWGGREGSEYDGSKDLAAALDRMREGVDTAAGYIKDKGYNLRIALEPKPNEPRGDIFLPTVGHGLAFIEQLEHGDIVGLNPETGHEQMAGLNFTHGIAQALWAEKLFHIDLNGQRGIKYEQELVFGHGDLTSAFFTVDLLENGFPNGGPKYTGPRHFDYKPSRTDGYDGVWDSAKANMSMYLLLKERALAFRADPEVQEAMKTSGVFELGETTLNAGESAADLMNDSASFAGFDAEAAAERNFAFIRLNQLAIEHLLGSR

SEQ ID NO: 230 - protein, 391 aa, Streptomyces albus
MNYQPTPEDRFTFGLWTVGWEGRDPFGDATRTALDPVESVRRLAELGAHGVTFHDDDLIPFGSSDSERYEHVKRFRQALDDTGMKVPMATTNLFTHPVFKDGGFTANDRDVRRYALRKTIRNIDLAVELGAETYVAWGGREGAESGGAKDVRDALDRMKEAFDLLGEYVTSQGYDIRFAIEPKPNEPRGDILLPTVGHALAFIERLERPELYGVNPEVGHEQMAGLNFPHGIAQALWAGKLFHIDLNGQNGIKYDQDLRFGAGDLRAAFWLVDLLESAGYSGPRHFDFKPPRTEDFDGVWASAAGCMRNYLILKERAAAFRADPEVQEALRASRLDELARPTAADGLQALLDDRSAFEEFDVDAAAARGMAFERLDQLAMDHLLGARGAAA

SEQ ID NO: 231 - protein, 393 aa, Actinoplanes missouriensis
SVQATREDKFSFGLWTVGWQARDAFGDATRTALDPVEAVHKLAEIGAYGITFHDDDLVPFGSDAQTRDGIIAGFKKALDETGLIVPMVTTNLFTHPVFKDGGFTSNDRSVRRYAIRKVLRQMDLGAELGAKTLVLWGGREGAEYDSAKDVSAALDRYREALNLLAQYSEDRGYGLRFAIEPKPNEPRGDILLPTAGHAIAFVQELERPELFGINPETGNEQMSNLNFTQGIAQALWHKKLFHIDLNGQHGPKFDQDLVFGHGDLLNAFSLVDLLENGPDGAPAYDGPRHFDYKPSRTEDYDGVWESAKANIRMYLLLKERAKAFRADPEVQEALAASKVAELKTPTLNPGEGYAELLADRSAFEDYDADAVGAKGFGFVKLNQLAIEHLLGAR

SEQ ID NO: 232 - protein, 387 aa, Streptomyces diastaticus
SYQPTPEDKFTFGLWTVGWQGRDPFGDATRGALDPAESVRRLAELGAHGVTFHDDDLIPFGATDSERAEHIKRFRQGLDETGMKVPMATTNLFTHPVFKDGGFTANDRDVRRYALRKTIRNIDLAVELGAQTYVAWGGREGAESGAAKDVRVALDRMKEAFDLLGEYVTSQGYDTPFAIEPKPNEPRGDILLPTIGHALAFIDGLERPELYGVNPEVGHEQMAGLNFPHGIAQALWAGKLFHIDLNGQSGIKYDQDLRFGPGDLRAAFWLVDLLESAGYEGPRHFDFKPPRTEDFDGVWASAAGCMRNYLILKERAAAFRADPEVQEALRAARLDELAQPTAGDGLQALLPDRSAFEDFDPDAAAARGMAFERLDQLAMDHLLGARG

SEQ ID NO: 233 - protein, 393 aa, Actinoplanes missouriensis
SVQATREDKFSFGLWTVGWQARDAFGDATRTALDPVEAVHKLAEIGAYGITFHDDDLVPFGSDAQTRDGIIAGFKKALDETGLIVPMVTTNLFTHPVFKDGGFTSNDRSVRRYAIRKVLRQMDLGAELGAKTLVLWGGREGAEYDSAKDVSAALDRYREALNLLAQYSEDRGYGLRFAIEPKPNEPRGDILLPTAGHAIAFVQELERPELFGINPETGHEQMSNLNFTQGIAQALWHKKLFHIDLNGQHGPKFAQDLVFGHGDLLNAFSLVDLLENGPDGAPAYDGPRHFDYKPSRTEDYDGVWESAKANIRMYLLLKERAKAFRADPEVQEALAASKVAELKTPTLNPGEGYAELLADRSAFEDYDADAVGAKGFGFVKLNQLAIEHLLGAR

SEQ ID NO: 234 - protein, 388 aa, Streptomyces rubiginosus
MNYQPTPEDRFTFGLWTVGWQGRDPFGDATRRALDPVESVQRLAELGAHGVTFHDDDLIPFGSSDSEREEHVKRFRQALDDTGMKVPMATTNLFTHPVFKDGGFTANDRDVRRYALRKTIRNIDLAVELGAETYVAWGGREGAESGGAKDVRDALDRMKEAFDLLGEYVTSQGYDIRFAIEPKPNEPRGDILLPTVGHALAFIERLERPELYGVNPEVGHEQMAGLNFPHGIAQALWAGKLFHIDLNGQNGIKYDQDLRFGAGDLRAAFWLVDLLESAGYSGPRHFDFKPPRTEDFDGVWASAAGCMRNYLILKERAAAFRADPEVQEALRASRLDELARPTAADGLQALLDDRSAFEEFDVDAAAARGMAFERLDQLAMDHLLGARG

SEQ ID NO: 235 - protein, 393 aa, Actinoplanes missouriensis
SVQATREDKFSFGLWTVGWQARDAFGDATRTALDPVEAVHKLAEIGAYGITFHDDDLVPFGSDAQTRDGIIAGFKKALDETGLIVPMVTTNLFTHPVFKDGGFTSNDRSVRRYAIRKVLRQMDLGAELGAKTLVLWGGREGAEYDSAKDVSAALDRYREALNLLAQYSEDRGYGLRFAIEPKPNQPRGDILLPTAGHAIAFVQELERPELFGINPETGHEQMSNLNFTQGIAQALWHKKLFHIDLNGQHGPKFDQDLVFGHGDLLNAFSLVDLLENGPDGAPAYDGPRHFDYKPSRTEDYDGVWESAKANIRMYLLLKERAKAFRADPEVQEALAASKVAELKTPTLNPGEGYAELLADRSAFEDYDADAVGAKGFGFVKLNQLAIEHLLGAR

SEQ ID NO: 236 - protein, 440 aa, Salmonella enterica
MQAYFDQLDRVRYEGPQSTNPLAFRHYNPDELVLGKRMEDHLRFAACYWHTFCWNGADMFGVGAFNRPWQQPGEALELAKRKADVAFEFFHKLNVPFYCFHDVDVSPEGASLKEYKNNFAQMVDVLAAKQEQSGVKLLWGTANCFTNPRYGAGAATNPDPEVFSWAATQVVTAMNATHKLGGENYVLWGGREGYETLLNTDLRQEREQIGRFMQMVVEHKHKMGFQGTLLIEPKPQEPTKHQYDYDVATVYGFLKQFGLEKEIKVNIEANHATLAGHSFHHEIATAIALGIFGSVDANRGDAQLGWDTDQFPISVEENALVMYEILKAGGFTTGGLNFDAKVRRQSTDKYDLFYGHIGAMDTMALSLKIAARMVEDGELDKRVAKRYAGWNGELGQQILKGQLSLGELAQYAEQHNLAPVHQSGHQELLENLVNRYLFDK

SEQ ID NO: 237 - protein, 440 aa, Klebsiella pneumoniae
MQTYFDQLDRVRYEGPKSTNPLAFRHYNPDELVLGKRMEDHLRFAACYWHTFCWNGADMFGVGSFDRPWQQPGDALEMAKRKADVAFEFFHKLNVPYYCFHDVDVSPEGASLKEYSNNFARMVEVLAEKQQQSGVKLLWGTANCFTNPRYGAGAATNPDPEVFSWAATQVVTAMNATHQLGGENYVLWGGREGYETLLNTDLRQEREQLGRLLQLVVEHKHKIGFKGTLLIEPKPQEPTKHQYDYDASTVYGFLKQFGLEKEIKLNIEANHATLAGHSFHHEIATAIALGLFGSVDANRGDPQLGWDTDQFPNRVEEDALVMYEIFKAGGFTTGGLNFDAKVRRQSTDKYDLFYGHIGAMDTMAVSLKVAARMIEDGELDKRVARRYAGWNGELGQQILNGQMTLSDIAQYAAQHQLAPQHRSGQQEQLENLVNHYLFDK

SEQ ID NO: 238 - protein, 436 aa, Sinorhizobium meliloti
MSTGFFGDIAKIKYEGPESTNPLAFRHYNPDDVVLGKRMEDHLRFAVAYWHTFVWPGGDPFGGQTFERPWFKDSMEAAKLKADVAFEFFQLLGVPYYCFHDADVRPEGRNFAENTSNLNAIVDYFAGKQGETGVKLLWGTANLFSNRRFMAGAATNPDPDVFAFAAATVKTCIDATQRLDGENYVLWGGREGYETLLNTDLKRELDQLGRFLNLVVEYKHRIGFKGTILIEPKPQEPTKHQYDYDVATVYGFLKRYGLENEVKVNIEQGHAILAGHSFEHELALANALGIFGSIDMNRNDYQSGWDTDQFPNNVPEMALAYYHVLAGGGFKTGGTNFDAKLRRQSIDPEDLLIGHIGGMDCCARGLKAAAKMIEDKALSAPLEARYAGWNVPEAKKMLDGGFSLEEIEAWVLKSDVNPQPKSGRQELLENVVNRYV

SEQ ID NO: 239 - protein, 440 aa, Escherichia coli
MQAYFDQLDRVRYEGSKSSNPLAFRHYNPDELVLGKRMEEHLRFAACYWHTFCWNGADMFGVGAFNRPWQQPGEALALAKRKADVAFEFFHKLHVPFYCFHDVDVSPEGASLKEYINNFAQMVDVLAGKQEESGVKLLWGTANCFTNPRYGAGAATNPDPEVFSWAATQVVTAMEATHKLGGENYVLWGGREGYETLLNTDLRQEREQLGRFMQMVVEHKHKIGFQGTLLIEPKPQEPTKHQYDYDAATVYGFLKQFGLEKEIKLNIEANHATLAGHSFHHEIATAIALGLFGSVDANRGDAQLGWDTDQFPNSVEENALVMYEILKAGGFTTGGLNFDAKVRRQSTDKYDLFYGHIGAMDTMALALKIAACMIEDGELDKRIAQRYSGWNSELGQQILKGQMSLADLAKYAQEHNLSPVHQSGRQEQLENLVNHYLFDK

SEQ ID NO: 240 - protein, 425 aa, Salmonella enterica
MQAYFDQLDRVRYEGPQSTNPLAFRHYNPDELVLGKRMEDHLRFAACYWHTFCWNGADMFGVGAFNRPWQQPGEALELAKRKADVAFEFFHKLNVPFYCFHDVDVSPEGASLKEYKNNFAQMVDVLAAKQEQSGVKLLWGTANCFTNPRYGAGAATNPDPEVFSCAATQVVTAMNATHKLGGENYVLWGGREGYETLLNTDLRQEREQIGRFMQMVVEHKHKMGFQGTLLIEPKPQEPTKHQYDYDVATVYGFLKQFGLEKEIKVNIEANHATLAGHSFHHEIATAIALGIFGSVDANRGDAQLGWDTDQFPISVEENALVMYEILKAGGFTTGGLNFDAKVRRQSTDKYDLFYGHIGAMDTMALSLKIAARMVEDGELGQQILKGQLSLGKLAQYAEQHHLAPVHQSGHQELLENLVNRYLFDK

SEQ ID NO: 241 - protein, 445 aa, Xanthomonas campestris
MSNTVYIGAKEYFPGIGKIGFEGRDSDNPLAFKVYDANKTIGDKTMAEHLRFAVAYWHSFCGNGADPFGPGTRAYPWDAGTTALNRAEAKADAAFEFFTKLGVPYYCFHDIDLAPDADDIGEYEKNLKHMVGIAKQRQADTGIKLLWGTANLFSHPRYMNGASTNPDFNVVARAAVQVKAAIDATVELGGENYVFWGGREGYACLHNTQMKREQDNMARFLTLARDYGRAIGFKGNFLIEPKPMEPMKHQYDFDSATVIGFLRQHGLDQDFKLNIEANHATLSGHSFEHDLQVASDAGLLGSIDANRGNPQNGWDTDQFPTDLYDTVGAMLVVLRQGGLAPGGLNFDAKVRRESSDPQDLFLAHIGGMDAFARGLEVANALLTASPLEQWRAERYASFDSGAGADFAAGKTTLADLAKHAASNAPQQLSGRQEAYENLINQYLTR

SEQ ID NO: 242 - protein, 439 aa, Pectobacterium atrosepticum
MQAYFEQIEKVRYEGSQSSNPFAFRHYNPDQEILGKRMADHLRFAVAYWHTFCWNGSDMFGVGSFARPWQQSGDALELAKRKADIAFEFFQKLSVPYYCFHDVDVAPEGNSLKEYLHNIAVITDVLAEKQQDSGVKLLWGTANCFTNPRYGAGAATNPDPDVFAWAATQVFTAMNATKTLGGENYVLWGGREGYETLLNTDLRQEREQIGRFMQMVVEHKHKIGFQGTLLIEPKPQEPTKHQYDYDVATVYGFLKQFGLEKEIKVNVEANHATLAGHSFHHEIATAVALGVFGSVDANRGDPQLGWDTDQFPNSVEENTLIMYEILKAGGFTTGGLNFDAKVRRQSTDRYDLFHAHIGAMDTMALALKAAARMIEDDKLNQLVAKRYAGWNGELGQQILQGNASLESLAQYAESHQLAPQHQSGQQELLENLVNRHLFG

SEQ ID NO: 243 - protein, 439 aa, Rhodopirellula baltica
MTAFPDVPVIQYEGPQSDNPLAFRWYNPDEVIEGKTMKDHMRFSIVYWHTFRGTGADPFGPGTAVRPWDNGSESVENAQKRAVVAFELFTKLQAPYYAWHDRDVAPEGANLRETHANLDAVADVLEEQQKATGVKLLWGTANMFSNPRFMHGAATSCNADVFAYAGAQVKKALEVTKRLGGENYVFWGGREGYQNLYNTDMKRELDHLAKFFHMAVDYAKSIGFDGQFLIEPKPKEPTKHQYDSDAAACMNFLRAYDLDSHFKLNIETNHATLAGHTMMHELDYAGIQGGLGSIDANTGDLLLGWDTDQFPTDYYLTTQTMLMILKHGGIGTGGVNFDAKVRRESFEPIDLFHAHIGGMDAFAKGLKIAAAIRASGELADFVKNRYSTWDSGIGAKIEAGEVGFAELEAYMLEKGDVDANQSGRQEYLEHMINKYIDRV

SEQ ID NO: 244 - protein, 445 aa, Xanthomonas axonopodis
MSNTVYIGAKEYFPGIGKIGFEGRDSDNPLAFKVYDANKTIGDKTMAEHLRFAVAYWHSFCGNGADPFGPGTRAYPWDVGDTALNRAEAKADAAFEFFTKLGVPYYCFHDIDLSPDADDITEYESNLKHMVGVAKQRQADTGIKLLWGTANLFSHPRYMNGASTNPDFNVVARAAVQVKAAIDATVALGGENYVFWGGREGYACLHNTQMKREQDNMARFLTLARDYGRSIGFKGNFLIEPKPMEPMKHQYDFDSATVIGFLRQHGLDQDFKLNIEANHATLSGHSFEHDLQVASDAGLLGSIDANRGNPQNGWDTDQFPTDLYDTVGAMLVVLRQGGLAPGGLNFDAKVRRESSDPQDLFLAHIGGMDAFARGLEVANALLTASPLEQWRAERYASFDSGAGADFAAGKTTLADLAKHAAGNAPQQISGRQEAYENLINQYLTR

SEQ ID NO: 245 - protein, 445 aa, Xanthomonas oryzae
MSNTVYIGAKEYFPGIGKIGFEGRESDNPLAFKVYDANKTIGDKTMAEHLRFAVAYWHSFCGNGADPFGPGTRAYPWDVGNSALARAEAKSDAAFEFFTKLGVPYYCFHDIDLSPDADDIGEYESNLKHMVGVAKQRQADTGIKLLWGTANLFSHPRYMNGASTNPDFNVVARAAVQVKAAIDATVELGGENYVFWGGREGYACLHNTQMKREQDNMARFLTLARDYGRSIGFTGNFLIEPKPMEPMKHQYDFDSATVIGFLRQHGLDQDFKLNIEANHATLSGHSFEHDLQVASDAGLLGSIDANRGNPQNGWDTDQFPTDLYDTVGAMLVVLRQGGLAPGGLNFDAKVRRESSDPQDLFLAHIGGMDAFARGLEVANALLTSSPLEQWRAERYASFDNGTGADFAAGKITLADLAAHAAGNAPKQISGRQEAYENLINQYLTR

SEQ ID NO: 246 - protein, 447 aa, Pediococcus pentosaceus
MSEYYDFNKMEYIGNQKGLKAGDGFHYYNPDELIQGKKMSEWLKFSVAYWHTMDQRLVDPFGDGTAQRPWDKFEDPMEQALAKVDYMFEFLDKMNVEYFAFHDRDLAPEGNTLRETNANLDKVVDKIVEKMQETGKKVLWNTSSLFTNPRFVAGGATAPFADIVAYSAAQIKHSLEIAKRVNSMNYVFWGGREGYESLLNTDMKLEQEHIAKFFHMAKDYANEIGYTGQFLLEPKPKEPTSHQYDTDAATTIAFLKTYGLEKDFKLNLEGNHAYLAGHTYEHEVRVARDAGLLGSLDANMGDKLIGWDIDEFPNDIYEATLVMYEMLKNGGLATGGLNFDAKPRRQSFTMEDLFLAHTAGMDTYAAGLRVAAKLLEDRVFDSVIEDRYSSFKSGIGADFENDKVTFKELEDYVIDKPQSELIAATKSGHLEQLKSTLNNYIFTVLGK

SEQ ID NO: 247 - protein, 435 aa, Brucella suis
MSTGFFGDIQKVRYEGPESDNPLAFRHYNADEIVLGKRMEDHLRFAVAYWHSFAWEGGDPFGGRTFDRPWFSNEIDAAKLKADVAFEFFSLLGAPYYCFHDADVRPEGRNFAENTRYLNEIVDIFEKKQAETGMKLLWGTANLFSNRRYMAGAATNPDPDVFAFAAATVKTCIDATKRLGGENYVLWGGREGYETLLNTDLSRELDHMGRFLSLVVEYKHKIGFKGTILIEPKPQEPTKHQYDYDVATVYGFLKRYGLENEVKVNIEQGHAILAGHSFEHELALARTLGIFGSIDMNRNDYQSGWDTDQFPNNVPEMALAYYQVLLAGGFTTGGTNFDAKLRRQSLDSQDLLIGHIGGMDCCARGLKAAARMLEDGALSKPLDERYAGWNGEFGKRLLSGLSLDQIAGEVEAKDINPQPKSGRQEYLENIVNHYV

SEQ ID NO: 248 - protein, 440 aa, Escherichia coli
MQAYFDQLDRVRYEGSKSSNPLAFRHYNPDELVLGKRMEEHLRFAACYWHTFCWNGADMFGVGAFNRPWQQPGEALALAKRKADVAFEFFHKLHVPFYCFHDVDVSPEGASLKEYINNFAQMVDVLAGKQEESGVKLLWGTANCFTNPRYGAGAATNPDPEVFSWAATQVVTAMEATHKLGGENYVLWGGREGYETLLNTDLRQEREQLGRFMQMVVEHKHKIGFQGTLLIEPKPQEPTKHQYDYDAATVYGFLKQFGLEKEIKLNIEANHATLAGHSFHHEIATAIALGLFGSVDANRGDAQLGWDTDQFPNSVEENALVMYEILKAGGFTTGGLNFDAKVRRQSTDKYDLFYGHIGAMDTMALALKIAARMIEDGELDKRIAQRYSGWNSELGQQILKGQMSLADLAKYAQEHNLSPVHQSGRQEQLENLVNHYLFDK

SEQ ID NO: 249 - protein, 449 aa, Bifidobacterium longum
MGLWDVDKIEYVGRAKGPKEDFAFHYYDADKVVAGKKMKDWLRFGVAWWHTFNQELVDPFGTGTAHRPYYKYTDPMDQALAKVDYAFELFQKLGVEYFCFHDRDIAPEGDTLRETNANLDKVVDKIEENMKSTGVKLLWNTSSLFTNPRFVSGAATSPFADIYAYAGGQLKKSLEIGKRLGAENYVFWGGREGYENLWNTEMKRETDHIAKFFHMCADYAKEIGFEAQFLIEPKPKEPTLHQYDFDAATAIEFLRNHDLTDVFKLNLEGNHANLAGHTYQHEIRVARESGFLGSLDANQGDKLIGWDMDEFPTDLYETVAVMWEVLQAGSIGPHGGLNFDAKPRRTSFYEEDLFRSHIAGMDAYAAGLLVADKMNQDGFIQNLQAERYSSYDSGIGKDIDEGNVTLADLEAYSLDKPQSELIAATKSDHLESVKATINNYIIDALAEVE

SEQ ID NO: 250 - protein, 435 aa, Brucella canis
MSTGFFGDIQKVRYEGPESDNPLAFRHYNADEIVLGKRMEDHLRFAVAYWHSFAWEGGDPFGGRPFDRPWFSNEIDAAKLKADVAFEFFSLLGAPYYCFHDADVRPEGRNFAENTRYLNEIVDIFEKKQAETGMKLLWGTANLFSNRRYMAGAATNPDPDVFAFAAATVKTCIDATKRLGGENYVLWGGREGYETLLNTDLSRELDHMGRFLSLVVEYKHKIGFKGTILIEPKPQEPTKHQYDYDVATVYGFLKRYGLENEVKVNIEQGHAILAGHSFEHELALARTLGIFGSIDMNRNDYQSGWDTDQFPNNVPEMALAYYQVLLAGGFTTGGTNFDAKLRRQSLDPQDLLIGHIGGMDCCARGLKAAARMLEDGALSKPLDERYAGWNGEFGKRLLSGLSLDQIAGEVEAKDINPQPKSGRQEYLENIVNRYV

SEQ ID NO: 251 - protein, 440 aa, Burkholderia multivorans
MSYFEHIPAIRYEGPQSDNPLAYHHYDRTKRVLGKTLEEHLRIAVCYWHTFVWPGHDIFGQGAFRRPWQQPGDALERARQKADAAFEFFTKLGTPFYTFHDTDVAPEGDSLREYVDNFARMVDYLGERQQASGVRLLWGTANLFSHPRFAAGAATNPNPDVFAWAATQVRHALDATHRLGGENYVLWGGREGYETLLNTDLKREREQFARFLSMVVEHKHRIGFRGALLIEPKPQEPTKHQYDYDVATVHGFLTQYGLQDEIRVNIEANHATLAGHSFHHEIANAFALGVFGSVDANRGDPQNGWDTDQFPNSVEELTLAFYEILRHGGFTTGGMNFDAKVRRQSVDPEDLFYGHVGAIDVLALALERAAVLVENDRLEAMRRQRYAQWDDAFGRKILSGGYTLESLAADALARGVNPQHASGAQERLENIVNQAIYALR

SEQ ID NO: 252 - protein, 435 aa, Brucella ovis
MSTGFFGDIQKVRYEGPESDNPLAFRHYNADEIVLGKRMEDHLRFAVAYWHSFAWEGGDPFGGRTFDRPWFSNEIDAAKLKADVAFEFFSLLGAPYYCFHDADVRPEGRNFAENTRYLNEIVDIFEKKQAETGMKLLWGTANLFSNRRYMAGAATNPDPDVFAFAAATVKTCIDATKRLGGENYVLWGGREGYETLLNTDLSRELDHMGRFLSLVVEYKHKIGFKGTILIEPKPQAPTKHQYDYDVATVYGFLKRYGLENEVKVNIEQGHAILAGHSFEHELALARTLGIFGSIDMNRNDYQSGWDTDQFPNNVPEMALAYYQVLLAGGFTTGGTNFDAKLRRQSLDPQDLLIGHIGGMDCCARGLKASARMLEDGALSKPLDERYAGWNGEFGKRLLSGLSLDQIAGEVEAKDINPQPKSGRQEYLENIVNRYV

SEQ ID NO: 253 - protein, 436 aa, Rhizobium etli
MSTGFFGDIQKIKYEGPDSTNPLAFRHYQPDEIVLGKRMEDHLRFAVAYWHTFTWPGGDPFGGQTFLRPWFEDTMKAAKLKADVAFEFFSLLGAPYYCFHDADVRPEGRNFAENTKNLNEIVDYFAEKQAATGTKLLWGTANLFSNRRYMSGAATNPDPDVFAFAAATVKTCIDATQKLGGENYVLWGGREGYETLLNTDLKRELDQLGRFLNLVVEYKHKIGFKGTILIEPKPQEPTKHQYDYDVATVYGFLKKHGVENEVKVNIEQGHAILAGHSFEHELALANALGIFGSIDMNRNDYQSGWDTDQFPNNVPEMALAYYHVLAGGGFKTGGTNFDAKLRRQSLDPADLLIGHIGGMDCCARGLKAAAKMIEDKALSQPLADRYAGWESAEAQKLFRGEYSLDEITNWVESHDVNPQPKSGKQELLENVVNRYV

SEQ ID NO: 254 - protein, 440 aa, Burkholderia xenovorans
MSYFEHIPEIRYEGPQSDNPLAYRHYDKSKKVLGKTLEEHLRIAVCYWHTFVWPGVDIFGQGTFRRPWQQAGDAMERARQKADSAFEFFSKLGTPYYTFHDTDVSPEGSSLKEYSENFLRITDYLARKQEDTGIKLLWGTANLFSHPRYAAGAATSPDPEVFAFAATQVRHALDATQRLGGDNYVLWGGREGYDTLLNTDLMRERDQLARFLHMVVDHAHKIGFKGSLLIEPKPQEPTKHQYDYDVATVHGFLLQHGLEKEIRVNIEANHATLAGHSFHHEIATAYALGIFGSVDANRGDPQNGWDTDQFPNSVEELTLAFYEILKHGGFTTGGMNFDSKVRRQSVDPEDLFYGHIGAIDNLALAVERAAVLIENDRLDQFKRQRYAGWDADFGRKILSGDYSLSTLATDALARGLNPQHASGHQELMENIVNQAIYSGR

SEQ ID NO: 255 - protein, 439 aa, Actinobacillus pleuropneumoniae
MSNYFDKIEKVKYEGADSTNPFAFKHYNPNEVILGKTMAEHLRLAVCYWHTFCWTGNDMFGVGSLDRSWQKTGDLLEGAKQKAEIAFEFFQKLGIPYYCFHDVDIAPEGNSYKEYVHNFHTMVDILEKKQAETGVKLLWGTANCFTNPRYMSGASTNPNPEVFSWAASQVFNAMNATKRLGGENYVLWGGREGYETLLNTDLKREREQIGRFMQMVVEHKHKIGFNGTLLIEPKPQEPTKHQYDYDVATVYGFLKQFGLEKEIKVNIEANHATLAGHTFQHEIATAAALDIFGSIDANRGDPQLGWDTDQFPNSVEENTLVMYEILKAGGFTTGGFNFDAKIRRQSTDPYDLFHGHIGAIDVLALSLKRAAKMIEDKTLQGIVDQRYAGWNGDLGQQILAGKASLEDLAKIVESKALDPKPVSGQQEYLENLVNNYIYR

SEQ ID NO: 256 - protein, 440 aa, Burkholderia cenocepacia
MSYFEHIPAIRYEGPQSDNPLAYHHYDPDKRVLGKTLAEHLRIAVCYWHTFVWPGHDIFGQAAFRRPWQQPGDALERARMKADAAFEFFTKLGTPFYTFHDTDVAPEGDSLREYAANFARMVDYLGERQQASGVRLLWGTANLFSHPRFAAGAATNPNPDVFAWAATQVCHALDATHRLGGENYVLWGGREGYETLLNTDLKRERDQFARFLSMVVEHKHRIGFKGALLIEPKPQEPTKHQYDYDVATVHGFLVQYGLQNEIRVNIEANHATLAGHSFHHEIANAFALGVFGSVDANRGDPQNGWDTDQFPNSVEELTLAFYEILRHGGFTTGGMNFDAKVRRQSIDPEDLFYGHVGAIDVLALALERAAVLVENDRLDALRRQRYAQWDDAFGRKILAGGYTLESLAADALARGVDPQHASGAQERLENIVNQAIYGLR

SEQ ID NO: 257 - protein, 438 aa, Solibacter usitatus
MTESYFASIAPIEFEGAASENPLAYRYYDKNRVVLGKRMEDHLRMAVCYWHTFCSEGADMFGPGTFHRPWHIGPMDQAHAEHKLNEAFEFFTRLGLPFFCFHDTDVMAEAHTIREHVDNLARIGDRIQEKMAATGVKLLWGTANLFSHPRYMAGAASNPDPDVFRFAATQVRHCMDLTKRLGGQNYVLWGGREGYDSLLNTDLKQEKAQLGRFLKMVIEHKHKIGFSGTILIEPKPHEPTKHQYDFDVETVYSFLVANGLEKEVKLNIEANHATLAGHSFEHEIATAVALGVFGSIDMNRGDPQNGWDTDQFPNDVREITTALYYILLGGGFTTGGNNFDAKVRRQSFEPADLFYAHVGAVDTVAQGLINAAAMIEGGQLAGIVKERYAGWQGELGRAILDGKMSLEALSDGAVAEGITPRPRSGRQEMIENLVGRYL

SEQ ID NO: 258 - protein, 435 aa, Brucella abortus
MSTGFFGDIQKVRYEGPESDNPLAFRHYNADEIVLGKRMEDHLRFAVAYWHSFAWEGGDPFGGRTFDRPWFSNEIDAAKLKADVAFEFFSLLGAPYYCFHDADVRPEGRNFAENTRYLNEIVDIFEKKQAETGMKLLWGTANLFSNRRYMAGAATNPDPDVFAFAAATVKTCIDATKRLGGENYVLWGGREGYETLLNTDLSRELDHMGRFLSLVVEYKHKIGFKGTILIEPKPQEPTKHQYDYDVATVYGFLKRYGLENEVKVNIEQGHAILAGHSFEHELALARTLGIFGSIDMNRNDYQSGWDTDQFPNNVPEMALAYYQVLLAGGFTTGGTNFDAKLRRQSLDPQDLLIGHIGGMDCCARGLKAAARMLEDGALSKPLDERYAGWNGEFGKRLLSGLSLDQIAGEVEAKDINPQPKSGRQEYLENIVNRYV

SEQ ID NO: 259 - protein, 433 aa, Rhodobacter sphaeroides
MTDFFAGIPQIRYEGEGSSNEFAYRHYNPDEMILGKRMEDHLRFAVAWWHSFAWPGGDPFGAQTLERPWFGDTLDLARMKADVAFEMFEILGAPFFCFHDADIRPEGATFAESKRNLEAIVDHIGARMERSKTRLLWGTANLFSHRRFMSGAATNPDPDVFAWSAATVKACMDATKKLGGANYVLWGGREGYETLLNTDLKREAEQAGRFLQMVVDYKYKIGFEGTILIEPKPQEPSKHQYDYDVATVYGFLKRFGLENEVKLNVEQGHAILAGHSFEHELALAASLGILGSIDMNRNDYQSGWDTDQFPNNHPEMALAYYEVLRAGGFTTGGTNFDAKIRRQSLDPEDLILAHVGGMDTCARALKAAARLYEDGSLERARADRYAGWETPEAKAMLSSSLEEIEARVLAEDINPQPRSGRQERLENLWNRFV

SEQ ID NO: 260 - protein, 438 aa, Thermoanaerobacter sp.
MEYFKNVPQIKYEGPKSNNPYAFKFYNPDEIIDGKPLKEHLRFSVAYWHTFTANGTDPFGAPTMQRPWDHFTDPMDIAKARVEAAFELFEKLDVPFFCFHDRDIAPEGETLRETNKNLDTIVAMIKDYLKTSKTKVLWGTANLFSNPRFVHGAATSCNADVFAYAAAQVKKALEITKELGGQNYVFWGGREGYETLLNTDMELELDNLARFLHMAVEYAQEIGFEGQFLIEPKPKEPTKHQYDFDAASVHAFLKKYDLDKYFKLNIEANHATLAGHDFQHELRYARINNILGSIDANMGDMLLGWDTDQYPTDIRMTTLAMYEVIKMGGFNKGGLNFDAKVRRASFEPEDLFLGHIAGMDAFAKGFKVAYKLVKDGVFDRFIEERYKSYREGIGAEIVSGKANFKTLEEYALNNPKIENKSGKQELLESILNQYLFSE

SEQ ID NO: 261 - protein, 439 aa, Yersinia pseudotuberculosis
MQSYFNELEQVRYEGSQSTNPLAFHHYNPDEMILGKRMADHLRFAACYWHTFCWGGADMFGANAFDRPWQQPGDALALAKRKAEVAFEFFHKLNVPYYCFHDVDVSPEGASLQEYLNNFAVMTDVLAEKQAASGVKLLWGTANCFTHPRYGAGAATNPDPEVFSWAATQVFTAMNATRQLGGENYVLWGGREGYETLLNTDLRQEREQIGRFMQMVVEHKHKTGFQGTLLIEPKPQEPTKHQYDYDVATVYGFLKQFGLEKEIKVNIEANHATLAGHSFHHEIASAIALGIFGSVDANRGDPQLGWDTDQFPNSVEENTLVMFEILKAGGFTTGGLNFDAKVRRQSTDKYDLFYGHIGAMDTMALALKFAAKMIEDGQLDQIVAKRYAGWNSELGQQILQGKMSLEELSRYASQHNLNPQHQSGHQELLENKVNRYLFG

SEQ ID NO: 262 - protein, 445 aa, Xanthomonas oryzae; identical to SEQ ID NO: 245

SEQ ID NO: 263 - protein, 449 aa, Bifidobacterium longum
MGLWDVDKIEYVGRAKGPKEDFAFHYYDADKVVAGKKMKDWLRFGVAWWHTFNQELVDPFGTGTAHRPYYKYTDPMDQALAKVDYAFELFQKLGVEYFCFHDRDIAPEGDTLRETNANLDKVVDKIEENMKSTGVKLLWNTSSLFTNPRFVSGAATSPFADIYAYAGGQLKKSLEIGKRLGAENYVFWGGREGYENLWNTEMKRETDHIAKFFHMCADYAKEIGFEAQFLIEPKPKEPTLHQYDFDAATAIEFLRNHDLTDVFKLNLEGNHANLAGHTYQHEIRVARESGFLGSLDANQGDKLIGWDMDEFPTDLYETVAVMWEVLQAGSIGPHGGLNFDAKPRRTSFYEEDLFRSHIAGMDTYAAGLLVADKMNQDGFIQDLMAERYSSYDSGIGKDIDEGNVTLADLEAYSLDKPQSELIAATKSDHLESVKATINNYIIDALSEVE

SEQ ID NO: 264 - protein, 438 aa, Thermoanaerobacter pseudethanolicus
MEYFKNVPQIKYEGPKSNNPYAFKFYNPDEIIDGKPLKEHLRFSVAYWHTFTANGTDPFGAPTMQRPWDHFTDPMDIAKARVEAAFELFEKLDVPFFCFHDRDIAPEGETLRETNKNLDTIVAMIKDYLKTSKTKVLWGTANLFSNPRFVHGAATSCNADVFAYAAAQVKKALEITKELGGQNYVFWGGREGYETLLNTDMELELDNLARFLHMAVEYAQEIGFEGQFLIEPKPKEPTKHQYDFDAASVHAFLKKYDLDKYFKLNIEANHATLAGHDFQHELRYARINNMLGSIDANMGDMLLGWDTDQYPTDIRMTTLAMYEVIKMGGFNKGGLNFDAKVRRASFEPEDLFLGHIAGMDAFAKGFKVAYKLVKDGVFDRFIEERYKSYREGIGAEIVSGKANFKTLEEYALNNPKIENKSGKQELLESILNQYLFSE

SEQ ID NO: 265 - protein, 439 aa, Photobacterium profundum
MTEFFKNINKIQFEGTDAINPLAFRHYDAERMILGKSMKEHLRFAACYWHNFCWPGSDVFGAATFDRPWLQSGNAMEMAHMKADAAFDFFSKLGVPYYCFHDTDIAPEGTSLKEYVNNFAQMVDVLEQKQDETGLKLLWGTANAFSNPRYMSGAGTNPDPKVFAYAATQIFNAMGATQRLGGENYVLWGGREGYETLLNTDLRQEREQLGRLMQMVVEHKHKIGFKGTILIEPKPQEPTKHQYDYDTATVYGFLKQFGLENEIKVNIEANHATLAGHSFQHEIATATSLGLFGSIDANRGDPQLGWDTDQFPNSVEENTLVMYEILKAGGFTTGGFNFDSHVRRPSIDAEDLFYGHIGGMDTMALALERAANMIENDVLSKNIAQRYAGWNEDLGKKILSGDHSLETLAKFALDSNIAPVKESGRQEHLENIVNGFIYK

SEQ ID NO: 266 - protein, 440 aa, Escherichia coli; identical to SEQ ID NO: 248

SEQ ID NO: 267 - protein, 436 aa, Agrobacterium tumefaciens
MSTGFFGDIAKIKYEGPDSTNPLAFRHYNPDEIVGGKRMEDHLRFAVAYWHTFTWPGGDPFGGQTFQRPWFEDTMQAAKLKADVAFEFFSLLGSPFYCFHDADVRPEGKNFAENTKNLNEIVDYFAQKQADTGVKLLWGTANLFSNRRFMSGAATNPDPDVFAFSAATVKTCMDATKTLGGANYVLWGGREGYETLLNTDLSRELDQLGRFLNLVVEYKYKIGFEGTILIEPKPQEPTKHQYDYDVATVYAFLQKNGLEKEVKVNIEQGHAILAGHSFEHELAMANAFGIFGSIDMNRNDYQSGWDTDQFPNNVPEMALAYYHVLAGGGFKNGGTNFDSKLRRQSLDPQDLLIGHIGGMDCCARGLKAAAKMIEDGALSKPLSERYAKWDSPEAQKMLRGELKLEEIAALVERDDINPEPKPGRQEYLENVVNRYV

SEQ ID NO: 268 - protein, 435 aa, Tetragenococcus halophilus
MDYFENVPKVQYEGKNAKSKYAFRHYNPEEIIMGKPMKDHLRFSVAFWHTMTEDGSDPFGDGTYQRNWEGSTPMETAKNRVDAFFEILEKLGAEYFCFHDVDIAPQGDSLKEFLENIDVMTDYIKGKMDKTGVKLLWNTANMFTHPTFVNGAATTNNADVYSMAAAQVKKGLDVSKKLNGENYVFWGGREGYENLLNTDMNFELDNLARFYQMVIDYAQKIDYHPQFLIEPKPKEPTKHQYDYDAATAMAFIQKYNLEDSFKLNLEANHATLAGHTFEHELNVAKNYNALGSLDANQGDLLLGWDTDEFPTDIYTATLAMYEVLDFGGIAPGGLNFDAKVRRTSFAMDDLILAHIAGMDTYARGLRAAAKMKDDNFFEQIIANRYESFSSGIGKQIVENKEDLESLTNYALSLNGVENKSGHIEHLKSLLNDYLV

SEQ ID NO: 269 - protein, 440 aa, Salmonella enterica; identical to SEQ ID NO: 236

SEQ ID NO: 270 - protein, 439 aa, Yersinia pseudotuberculosis; identical to SEQ ID NO: 261

SEQ ID NO: 271 - protein, 439 aa, Yersinia pseudotuberculosis; identical to SEQ ID NO: 261

SEQ ID NO: 272 - protein, 433 aa, Rhodobacter sphaeroides
MTDFFAGIPQIRYEGEGSSNEFAFRHYNPDEVILGKRMEEHLRFAVAWWHSFAWPGGDPFGGQTFNRPWFGDTLDLAKLKADVAFEMFDILGAPFFCFHDADIRPEGATFAESKRNLEEIVDHIGTRMEGSKTKLLWGTANLFSHRRFMSGAATNPDPDVFAWSAATVKGCMDATMKLGGANYVLWGGREGYETLLNTDLTREAENAGRFLQMVVDYKHKIGFQGTILIEPKPQEPSKHQYDYDVATVYGFLKRFGLEKEVKLNIEQGHAILAGHSFEHELALAASLGILGSIDMNRNDYQSGWDTDQFPHNHPEMALAYYEILRAGGFTTGGTNFDAKIRRQSLDPEDLVLAHVGGMDTCARALKAAARLYEDGSLEAARAARYAGWETPEAQAMLASSLEEIEARVLAEGINPEPRSGRQERLENLWNRFV

SEQ ID NO: 273 - protein, 435 aa, Brucella abortus; identical to SEQ ID NO: 258

SEQ ID NO: 274 - protein, 440 aa, Salmonella enterica; identical to SEQ ID NO: 236

SEQ ID NO: 275 - protein, 438 aa, Bacteroides vulgatus
MATKEYFPGIGKIKFEGKESKNPMAFRYYDAEKVINGKKMKDWLKFAMAWWHTLCAEGGDQFGGGTKKFPWNGDADKVQAAKNKMDAGFEFMQKMGIEYYCFHDVDLCEEADTIEEYEANLKEIVAYAKQKQAETGIKLLWGTANVFGHARYMNGAATNPEFDVVARAAVQIKNAIDATIELGGSNYVFWGGREGYMSLLNTDQKREKEHLAQMLTIARDYARSKGFTGTFLIEPKPMEPTKHQYDVDTETVVGFLKTHGLDKDFKVNIEVNHATLAGHTFEHELAVAVDNGMLGSIDANRGDYQNGWDTDQFPIDNYELTQAMMQIIRNGGLGNGGTNFDAKTRRNSTDLEDIFIAHIAGMDAMARALESAAALLNESPYCKMLSDRYASFDSGKGKEFEEGKLTLEDVVAYAKQNGEPKQVSGKQELYEAIVNMYC

SEQ ID NO: 276 - protein, 441 aa, Xanthomonas axonopodis
MYIGAKEYFPGIGKIGFEGRDSDNPLAFKVYDANKTIGDKTMAEHLRFAVAYWHSFCGNGADPFGPGTRAYPWDVGDTALNRAEAKADAAFEFFTKLGVPYYCFHDIDLSPDADDITEYESNLKHMVGVARQRQADTGIKLLWGTANLFSHPRYMNGASTNPDFNVVARAAVQVKAAIDATVALGGENYVFWGGREGYACLHNTQMKREQDNMARFLTLARDYGRSIGFKGNFLIEPKPMEPMKHQYDFDSATVIGFLRQHGLDQDFKLNIEANHATLSGHSFEHDLQVASDAGLLGSIDANRGNAQNGWDTDQFPTDLYDTVGAMLVVLRQGGLAPGGLNFDAKVRRESSDPQDLFLAHIGGMDAFARGLEVANALLTASPLEQWRAERYASFDSGAGADFAAGKTTLADLAKHAAGNAPQQISGRQEAYENLINQYLTR

SEQ ID NO: 277 - protein, 440 aa, Salmonella enterica; identical to SEQ ID NO: 236

SEQ ID NO: 278 - protein, 440 aa, Escherichia coli; identical to SEQ ID NO: 248

SEQ ID NO: 279 - protein, 433 aa, Roseobacter denitrificans
MTDFFKDIPAIRYEGPDTENEFAFRHYNPDEVVMGKTLKDHLRFACAYWHSFAWPGGDPFGGQTFERPWFGDTMELAKLKADVAFDMFERLGVPYFCFHDADVRPEGDTFAESTKNLEEITDYFAEKMDATGVKLLWGTANLFSHRRFMAGAATNPDPEVFAYSAATIKSCMDATRKLGGENYVLWGGREGYETLLNTDMARERAQAGRMLQMVVDYKHKTGFAGTILIEPKPQEPTKHQYDYDVATVYGFLKDFGLEGEVKVNIEQGHAILAGHSFEHELALARALGIFGSIDMNRNDYQSGWDTDQFPNNVPEMALAYYEVLRAGGFDTGGTNFDAKLRRQSLDPADLILAHVGGMDACAAGLKAAAAMLEDGKLEAAREARYAGWSEGLGQKLLTSDLAEISDLVIAKGINPQPRSGRQERLENLVNKYL

SEQ ID NO: 280 - protein, 439 aa, Bacteroides fragilis
MATKEYFPGIGKIKFEGKDSKNPMAFRYYDAEKMINGRSMKDWLKFAMAWWHTLCAEGGDQFGGGTKQFPWNGDPDPVQAAKNKMDAGFEFMQKMGIGYYCFHDVDLVTEADSIEAYEANLKELVAYAKQKQAETGIKLLWGTANVFSHARYMNGAATNPDFDVVARAAVQIKNAIDATIELGGTNYVFWGGREGYMSLLNTDQKREKEHLAQMLTIARDYGRARGFKGTFLIEPKPMEPTKHQYDVDTETVIGFLKAHGLDQDFKVNIEVNHATLAGHTFEHELAVAVDNGMLGSIDANRGDYQNGWDTDQFPIDNFELTQAMMQIIRNDGLGNGGTNFDAKTRRNSTDPEDIFIAHIAGMDAMARALESAANLLNESPYQKMLSDRYASFDAGKGKEFEEGKLSLEELVAYAKANGEPKQTSGQQELYEALVNIYSL

SEQ ID NO: 281 - protein, 440 aa, Enterobacter sakazakii
MPTYFDQLERVRYEGPKTTNLLAFRHYNPDELVAGKRMEDHLRFAACYWHTFCWNGSDMFGVGAFERPWQQAGDALSLAKRKADVAFEFFHKLNVPYYCFHDVDVSPEGASLKEYLNNFAQMVEVLAQKQQESGVKLLWGTANCFTHPRYGAGAATNPDPEVFSWAATQVVTAMNATHQLGGENYVLWGGREGYETLLNTDLRQEREQLGRFMQMVVEHKHKTGFRGTLLIEPKPQEPTKHQYDYDAATVYGFLKQFGLEKEIKLNIEANHATLAGHSFHHEIASAIALGLFGSVDANRGDPQLGWDTDQFPNSVEENALVMYEILKAGGFTTGGLNFDAKVRRQSTDKYDLFYGHIGAMDTMALSLKVAAKMLEEGELDKRVARRYAGWNGELGQQILKGQMTLAELAQYAEQHNLAPQHQSGHQEQLENLVNYYLFDK

SEQ ID NO: 282 - protein, 435 aa, Brucella abortus; identical to SEQ ID NO: 258

SEQ ID NO: 283 - protein, 445 aa, Geobacillus thermodenitrificans
MAYFPNIGKIAYEGPESRNPFAFKFYNPEEKVGGKTMEEHLRFSVAYWHTFTGDGSDPFGVGNMIRPWDKYSGMDLAKARVEAAFELFEKLNVPFFCFHDVDIAPEGETLSETYKNLDEIVDMIEEYMKTSKTKLLWNTANLFSHPRFVHGAATSCNADVFAYAAAKVKKGLEIAKRLGAENYVFWGGREGYETLLNTDMKLELDNLARFFHMAVDYAKEIGFDGQFLIEPKPKEPTKHQYDFDVATALAFLQTYGLKDYFKFNIEANHATLAGHTFEHELRVARIHGMLGSVDANQGDMLLGWDTDEFPTDLYATTLAMYEILQNGGLGRGGLNFDAKVRRGSFEPEDLFYAHIAGMDSFAIGLKVAHRLLEDRVFEQFIEERYKSYTEGIGREIVEGTADFHKLEQYALQLGEIRNTSGRLERLKTLLNQYLLEVSVPSKARL

SEQ ID NO: 284 - protein, 438 aa, Bacteroides thetaiotaomicron
MATKEFFPGIEKIKFEGKDSKNPMAFRYYDAEKVINGKKMKDWLRFAMAWWHTLCAEGGDQFGGGTKQFPWNGNADAIQAAKDKMDAGFEFMQKMGIEYYCFHDVDLVSEGASVEEYEANLKEIVAYAKQKQAETGIKLLWGTANVFGHARYMNGAATNPDFDVVARAAVQIKNAIDATIELGGENYVFWGGREGYMSLLNTDQKREKEHLAQMLTIARDYARARGFKGTFLIEPKPMEPTKHQYDVDTETVIGFLKAHGLDKDFKVNIEVNHATLAGHTFEHELAVAVDNGMLGSIDANRGDYQNGWDTDQFPIDNYELTQAMMQIIRNGGLGTGGTNFDAKTRRNSTDLEDIFIAHIAGMDAMARALESAAALLDESPYKKMLADRYASFDGGKGKEFEDGKLTLEDVVAYAKTKGEPKQTSGKQELYEAILNMYC

SEQ ID NO: 285 - protein, 439 aa, Haemophilus influenzae
MTTYFDKIEKISFEGEKSTNPFAFKHYDANQVILGKTMAEHLRLAVCYWHTFCWNGNDMFGLGSLERSWQKNSNLLAGAEQKADIAFEFLNKLGVPYYCFHDVDIAPEGNSVREYVQNFHHIVDILERKQVETGVKLLWGTANCFTNPRYMSGAATNPNPEVFAWAATQVFNAMNATQRLGGENYVLWGGREGYETLLNTDLKREREQIGRFMQMVVEHKHKIGFKGTLLIEPKPQEPTKHQYDYDVATVYGFLKQFGLEKEIKVNIEANHATLAGHTFQHEIATACALDIFGSIDANRGDPQLGWDTDQFPNSVEENTLVMYEILKHGGFTTGGFNFDAKIRRQSIDPYDLFYAHIGAIDVLALSLKRAAKMLQEETLQKIVNERYAGWNSELGQHILQGKTSLETLAQLVQQKDLAPKPVSGQQEYLENLVNQVIYS

SEQ ID NO: 286 - protein, 439 aa, Yersinia pseudotuberculosis; identical to SEQ ID NO: 261

SEQ ID NO: 287 - protein, 446 aa, Xanthomonas campestris
MSNTVFIGAKEYFPGIGKIGFEGRDSDNPLAFKVYDANKQVAGKSMAEHLRFAVAYWHSFCGNGADPFGPGTRAYPWDVGNTALARAEAKSDAAFEFFTKLGVPYYCFHDIDLAPDADDIGEYENNLKHMVRIAKQRQADTGVKLLWGTANLFSHPRYMNGASTNPDFNVVARAAVQVKAAIDATVELGGENYVFWGGREGYACLHNTQMKREQDNMARFLTLARDYGRAIGFTGNFLIEPKPMEPMKHQYDFDSATVIGFLHQHGLDQDFKLNIEANHATLSGHSFEHDLQVASDAGLLGSIDANRGNPQNGWDTDQFPTDLYDTVGAMLVVLRQGGLAPGGLNFDAKVRRESSDPQDLFLAHIGGMDAFARGLEVADALLTSSPLETWRAQRYASFDSGAGADFANGTSTLADLAKYAAGRGEPTQVSGRQEAYENLINQYLTR

SEQ ID NO: 288 - protein, 439 aa, Haemophilus somnus
MSNYFDKIAKVNYEGANSTNPFAFKHYNPNEVILGKTVEEHLRLAVCYWHTFCWTGNDMFGAGSLDRSWQKTGDLLVGAKQKAEIAFEFFQKLGVPYYSFHDVDIAPESNNFKEYLHNFNTIVDILEKKQSETGVKLLWGTANCFTNPRYMSGASTNPNPEVFAWAAAQVFTAMNATQRLGGENYVLWGGREGYETLLNTDLKREREQIGRFMQLVVEHKYKIGFQGTLLIEPKPQEPTKHQYDYDVATVYGFLKQFGLENEIKVNIEANHATLAGHTFQHEIATATSLGIFGSIDANRGDPQLGWDTDQFPNSVEENTLAMYEILKAGGFTTGGFNFDAKIRRQSTDPYDLFHAHIGAMDVLALSLKRAAKMIEDQTLQKVVDNRYAGWDQELGQKILSGKASLEDLAKIVETQGLDPKPVSGQQEYLENLVNSYLYR

SEQ ID NO: 289 - protein, 439 aa, Pseudoalteromonas atlantica
MAEYFKDIPKVKFEGTSSDNPLAFRHYNPEELVLGKSMKEHLRLAACYWHNFCWDGADVFGAGTFNRPWLQAGDAMQRAKEKADVAFEFFSKLNIPYYCFHDVDVSPEGNSIKEYINNFAQMTDVLEAKQEETGLKLLWGTANLFSNPRYASGAASSPNPEVFTYGATQVMHAMNATKRLGGENYVLWGGREGYETLLNTDLRQEREQLGRFMNMVVEHKHKIGFKGLLLIEPKPQEPTKHQYDYDTATVYGFLKQYGLENEFKVNIEANHATLAGHSFQHEVATAISLGLFGSIDANRGDPQLGWDTDQFPNSVEELSLVIYEILKAGGFTSGGFNFDTKLRRQSSDPQDMFIAHIGGMDHLAIGLKKAALMIENDFLGQAVSKRYAGWNGELGKGIQGGDFNLESLANLCVDKNLQPKHVSGQQELLENKVNNVLYG

SEQ ID NO: 290 - protein, 440 aa, Escherichia fergusonii
MQAYFDQLDRVRYEGPKTTNPLAFRHYNPDELVLGKRMEDHLRFAACYWHTFCWNGADMFGVGAFDRPWQQPGEALMLAKRKADVAFEFFHKLNVPFYCFHDVDVSPEGASLKEYKNNFAEMVDVLAAKQEQSGVKLLWGTANCFTNPRYGAGAATNPDPEVFSWAATQVVTAMEATKRLGGENYVLWGGREGYETLLNTDLRQEREQLGRFMQMVVEHKHKIGFQGTLLIEPKPQEPTKHQYDYDAATVYGFLKQFGLEKEIKLNIEANHATLAGHSFHHEIATAIALGLFGSVDANRGDAQLGWDTDQFPNSVEENALVMYEILKAGGFTTGGLNFDAKVRRQSTDKYDLFYGHIGAMDTMALALKVAARMIEDGELDKRVAQRYSGWNSELGQQILKGQMSLSDLAKYAQDHNLSPVHQSGHQELLESLVNHYLFDK

SEQ ID NO: 291 - protein, 436 aa, Silicibacter sp.
MTTGFFGDVSKITFEGADSTNPLAFRHYNPDEVILGKRMEEHLRFATCYWHNFVWPGGDPFGGQTFDRPWFKDTMHAAKLKADVAFEMFTLLQSPYYCFHDADVRPEGANFAENTRNLNEIVDYFAQKQEETGVKLLWGTANLFSNARYMSGASTNPDPDVFAFSAATIKTCMDATHRLGGENYVLWGGREGYETLLNTDLAQEDQQMGRMLNMVVEYKHKIGFKGAILVEPKPQEPSKHQYDYDAATVYGFLKRHGLENEVKLNLEQGHAILAGHSFEHEIATAQALGIFGSIDMNRNDYQSGWDTDQFPNNTPEVALAYYHILKHGGFTTGGTNFDAKLRRQSIDAEDLLMAHIGGMDICARGFKAAAAMIEDGTLDQFVTDRYAGWQTDPAQDMLAGKLSLDEIAKRVEAEDINPKPRSGRQEYLENLINRFV

SEQ ID NO: 292 - protein, 440 aa, Salmonella enterica
MQAYFDQLDRVRYEGPQSTNPLAFRHYNPDELVLGKRMEDHLRFAACYWHTFCWNGADMFGVGAFNRPWQQPGEALELAKRKADVAFEFFHKLNVPFYCFHDVDVSPEGASLKEYKNNFAQMVDVLAAKQEQSGVKLLWGTANCFTNPRYGAGAATNPDPEVFSWAATQVVTAMNATHKLGGENYVLWGGREGYETLLNTDLRQEREQIGRFMQMVVEHKHKMGFQGTLLIEPKPQEPTKHQYDYDVATVYGFLKQFGLEKEIKVNIEANHATLAGHSFHHEIATAIALGIFGSVDANRGDAQLGWDTDQFPISVEENALVMYEILKAGGFTTGGLNFDAKVRRQSTDKYDLFYGHIGAMDTMALSLKIAARMVEDGELDKRVAKRYAGWNSELGQQILKGQLSLGELAQYAEQHNLAPVHQSGHQELLENLVNRYLFDK

SEQ ID NO: 293 - protein, 449 aa, Bifidobacterium adolescentis
MGLWDIDKIPYVGREKGPQEGLAFHYYDADKVVAGKKMKDWLRFGVAWWHTFDQQLVDPFGTGTAQRPWYGKYSDPEDEALAKVDYAFEFFQKLGVEYFCFHDRDIAPEGDTLRETDKNLDKVVDKIEENMKSTGIKLLWNTSSLFTNPRFVSGASTSPFADIYAYAGGQLKHSLEIAKRLGAENYVFWGGREGYENLWNTQMKREQEHMAKFFHMCHDYAKEIGLDAQFLIEPKAKEPTMFQYDFDAATAINFLRTYDLMDVFKLNLEGNHANLAGHTYQHEIRTAREAGVLGSLDANQGDKLIGWDMDEFPTDLYETSTVMWEVLAEGQIGPHGGLNFDAKPRRTSFTAEDLFRSHIAGMDSFAAGLLVAAKMHEDKVIENLQAERYSSFDSGIGATVENGTASLASLEEYALDIPQSKLIEATKSDHLESVKATINNYMIDALAEA

SEQ ID NO: 294 - protein, 439 aa, Staphylococcus xylosus
MSYFDINKVNYEGPKSNNAFSFKYYNPEEKLGNHSMSELLRFSVAYWHTFTADLSDPFGVGVAERDWDSLDEMEKAKARVEAIFEFMEKTRIDYFCFHDVDISPEGASLKESNENLDIIVELIKEKMDQTGKKLLWNTTNNFTHERFVHGAATSSNAEVFAYAAAKVKKSLEIAKKLGSENFVFWGGREGYESLLNTNMKLELDNLATFFKMAKSYADEIGYTGQFLIEPKPKEPTTHQYDTDVATAHAFLQKYDLDKDFKFNIEANHATLAGHTFQHELRYARDNNMLGSVDANQGHPLLGWDTDESTDVYDTTLAMYEILKNGGLAPGGLNFDAKPRRTSFKQEDLILTHIAGMDTFALGLRVAYKMIEDNFFENIMDEKYKSFNEGIGKKIVEGETSLKELEDYAFNINTINNTSDHLEVIKSQINQYILNINNKD

SEQ ID NO: 295 - protein, 444 aa, Thermotoga maritima
MAEFFPEIPKIQFEGKESTNPLAFRFYDPNEVIDGKPLKDHLKFSVAFWHTFVNEGRDPFGDPTAERPWNRFSDPMDKAFARVDALFEFCEKLNIEYFCFHDRDIAPEGKTLRETNKILDKVVERIKERMKDSNVKLLWGTANLFSHPRYMHGAATTCSADVFAYAAAQVKKALEITKELGGEGYVFWGGREGYETLLNTDLGLELENLARFLRMAVEYAKKIGFTGQFLIEPKPKEPTKHQYDFDVATAYAFLKNHGLDEYFKFNIEANHATLAGHTFQHELRMARILGKLGSIDANQGDLLLGWDTDQFPTNIYDTTLAMYEVIKAGGFTKGGLNFDAKVRRASYKVEDLFIGHIAGMDTFALGFKIAYKLAKDGVFDKFIEEKYRSFKEGIGKEIVEGKTDFEKLEEYIIDKEDIELPSGKQEYLESLLNSYIVKTIAELR

SEQ ID NO: 296 - protein, 440 aa, Salmonella enterica
MQAYFDQLDRVRYEGPQSTNPLAFRHYNPDELVLGKRMEDHLRFAACYWHTFCWNGADMFGVGAFNRPWQQPGEALELAKRKADVAFEFLHKLNVPFYCFHDVDVSPEGASLKEYKNNFAQMVDVLAAKQEQSGVKLLWGTANCFTNPRYGAGAATNPDPEVFSWAATQVVTAMNATHKLGGENYVLWGGREGYETLLNTDLRQEREQIGRFMQMVVEHKHKMGFQGTLLIEPKPQEPTKHQYDYDVATVYGFLKQFGLEKEIKVNIEANHATLAGHSFHHEIATAIALGIFGSVDANRGDAQLGWDTDQFPISVEENALVMYEILKAGGFTTGGLNFDAKVRRQSTDKYDLFYGHIGAMDTMALSLKIAARMVEDGELDKRVAKRYAGWNGELGQQILKGQLSLGELAQYAEQHNLAPVHQSGHQELLENLVNRYLFDK

SEQ ID NO: 297 - protein, 438 aa, Pseudomonas syringae
MPYFPAVDKVRYEGPDSDSPLAFRHYDADKLILGKPMREHLRMAACYWHTFVWPGADMFGVGTFKRPWQGSGDPLELAIGKAETAFEFFSKLGIDYYSFHDTDVAPEGSSLKEYRNNFAQMIDQLERHQEQTGIKLLWGTANCFSNPRFAAGAASNPDPEVFAYAATQVFSAMNATQRLKGANYVLWGGREGYETLLNTDLRQEREQLGRFMRMVVEHKHKIGFKGDLLIEPKPQEPTKHQYDYDSATVFGFLQQYGLEKEIKVNIEANHATLAGHSFHHEIATAVSLGIFGSIDANRGDPQNGWDTDQFPNSVEEMTLATYEILKAGGFTNGGYNFDSKVRRQSLDEVDLFHGHVAAMDVLALALERAAAMVQNDKLQQFKDQRYAGWQQPFGKSLLAGEFSLESLAKHAFDKDLNPQAVSGRQELLEGVVNRFIYF

SEQ ID NO: 298 - protein, 425 aa, Shigella boydii
MQAYFDQLDRVRYEGSKSSNPLAFRHYNPDELVLGKRMEEHLRFAACYWHTFCWNGADMFGVGAFNRPWQQPGEALALAKRKADVAFEFFHKLHVSFYCFHDVDVSPEGASLKEYINNFAQMVDVLAAKQEESGVKLLWGTANCFTNPRYGAGAATNPDPEVFSWAATQVVTAMEATHKLGGENYVLWGGREGYETLLNTDLRQEREQLGRFMQMVVEHKHKIGFQGTLLIEPKPQEPTKHQYDYDAATVYGFLKQFGLEKEIKLNIEANHATLAGHSFHHEIATAIALGLFGSVDANRGDAQLGWDTDQFPNSVEENALVMYEILKAGGFTTGGLNFDAKVRRQSTDKYDLFYGHIGAMDTMALALKIAARMIEDGELDKRIAQRYSGWNSELGQQILKGQMSLADLAKYAQEHNLSPVHQSGR

SEQ ID NO: 299 - protein, 440 aa, Burkholderia ambifaria
MSYFEHIPAIRYEGPQSDNPLAYHHYDAEKRVLGKTMAEHLRIAVCYWHTFVWPGHDIFGQGAFQRPWQQPGDALERARLKADAAFEFFTKLGTPFYTFHDTDVAPEGDSLREYAANFARMVDYLGERQQASGVRLLWGTANLFSHPRFAAGAATNPNPDVFAWAATQVCHALDATHRLGGENYVLWGGREGYETLLNTDLKRERDQFARFLSMVVEHKHRIGFKGALLIEPKPQEPTKHQYDYDVATVHGFLVQYGLQNEIRVNIEANHATLAGHSFHHEIANAFALGVFGSVDANRGDPQNGWDTDQFPNSVEELTLAFYEILRHGGFTTGGMNFDAKVRRQSVDPEDLFYGHVGAIDVLALALERAAVLVENDRLDALRRQRYAQWDDAFGQKILSGGYTLQSLADDALARGVDPRHASGAQERLENIVNQAIYGLR

SEQ ID NO: 300 - protein, 445 aa, Bacillus amyloliquefaciens
MAHSHSGSVNYFESANKVIYEGKESTNPLAFKYYNSQEVIGGKTMKEHLRFSIAYWHTFTADGTDIFGAATMQRPWDHYKGMDLARARVDAAFELFEKLDAPFFAFHDRDIAPEGSTLKETNQNLDLIVDMIKDYMRTSGVKLLWNTANMFTNPRFVHGAATSCNADVFAYAAAQVKKGLETAKELGAENYVFWGGREGYETLLNTDLKFELDNMARFMHMAVDYAKEIGYTGQFLIEPKPKEPTTHQYDTDAATTIAFLKQYGLDNHFKLNLEANHATLAGHTFEHELRMARVHGLLGSVDANQGDPLLGWDTDEFPTDLYSATLAMYEILKNGGLGSGGLNFDAKVRRSSFEPDDLLYAHVAGMDTFARGLKAARKLIEDRVFEDVIQHRYRSFTEGIGLEIAEGRADFKTLEQYALNNQPIKNESGRQERLKAILNQYILQV

SEQ ID NO: 301 - protein, 439 aa, Haemophilus influenzae
MTSYFDKIEKISFEGEKSTNPFAFKHYDANQVILGKTMAEHLRLAVCYWHTFCWNGNDMFGLGSLERSWQKNPNLLAGAEQKADIAFEFLNKLGVPYYCFHDVDIAPEGNSVREYVQNFHHIVDILERKQVETGIQLLWGTANCFTNPRYMSGAATNPNPEVFAWAATQVFNAMNATQRLGGENYVLWGGREGYETLLNTDLKREREQIGRFMQMVVEHKHKIGFKGTLLIEPKPQEPTKHQYDYDVATVYGFLKQFGLEKEIKVNIEANHATLAGHTFQHEIATACALDIFGSIDANRGDPQLGWDTDQFPNSVEENTLVMYEILKHGGFTTGGFNFDAKIRRQSIDPYDLFYAHIGAIDVLALSLKRAAKMLQEETLQKIVNERYAGWNSELGQHILQGKTSLETLAQLVQQKDLAPKPVSGQQEYLENLVNQVIYS

SEQ ID NO: 302 - protein, 445 aa, Bacillus megaterium
MVQTSTNKINHFESANKVLYEGKDSKNPLAFKYYNPEEVVGGKTMKDQLRFSVAYWHQFTADGTDPFGAATMQRSWDRYDGMDLAKARVEAAFQLFETLNVPFFAFHDRDIAPEGSTLQETNKNLDVIVTMIKEYMQTSNVKLLWNTANMFTNPRFVHGAATSCNADVFRYAAAQVKKGLETAKELGAENYVFWGGREGYETLLNTNLQLELDNLARFMHMAVDYATEIGYTGQFLIEPKPKEPTTHQYDTDAATTISFLRQYGLDKYFKLNLEANHATLAGHTFEHELRVARVQGLLGSVDANQGDPLLGWDTDEFPTDLYSTTLAMYEILQNGGLGSGGLNFDAKVRRGSFEQDDLLYAHVAGMDAFARGLKVAHKLVEDRVFENVINERYSSFKEGIGLEIVEGKANFHTLEQYAFKNPNIANKSGRQERLKSILNQYILEV

SEQ ID NO: 303 - protein, 477 aa, Arabidopsis thaliana
MKKVEFFMLLLCFIAASSLVSADPPTCPADLGGKCSDSDDWQGDFFPEIPKIKYEGPSSKNPLAYRWYNAEEEILGKKMKDWFRFSVAFWHTFRGTGGDPFGAATKYWPWEDGTNSVSMAKRRMRANFEFLKKLGVDWWCFHDRDIAPDGTTLEESNKNLDEVIELAKELQKGSKIKPLWGTAQLFLHPRYMHGGATSSEVGVYAYAAAQVKKAMEVTHYLGGENYVFWGGREGYQTLLNTDMGRELDHLARFFEAAVAYKKKIGFKGTLLIEPKPQEPTKHQYDWDAATAANFLRKYGLIDEFKLNIECNHATLSGHTCHHELETARINGLLGNIDANTGDAQTGWDTDQFLTDVGEATMVMMSVIKNGGIAPGGFNFDAKLRRESTDVEDLFIAHISGMDTMARGLRNAVKILEEGSLSELVRKRYATWDSELGKQIEEGKADFEYLEKKAKEFGEPKVSSAKQELAEMIFQSAM

SEQ ID NO: 304 - protein, 440 aa, Escherichia coli
MQAYFDQLDRVRYEGSKSSNPLAFRHYNPDELVLGKRMEEHLRFAACYWHTFCWNGADMFGVGAFNRPWQQPGEALALAKRKADVAFEFFHKLHVPFYCFHDVDVSPEGASLKEYINNFAQMVDVLAAKQEESGVKLLWGTANCFTNPRYGAGAATNPDPEVFSWAATQVVTAMEATHKLGGENYVLWGGREGYETLLNTDLRQEREQLGRFMQMVVEHKHKIGFQGTLLIEPKPQEPTKHQYDYDAATVYGFLKQFGLEKEIKLNIEANHATLAGHSFHHEIATAIALGLFGSVDANRGDAQLGWDTDQFPNSVEENALVMYEILKAGGFTTGGLNFDAKVRRQSTDKYDLFYGHIGAMDTMALALKIAARMIEDGELDKRIAQRYSGWNSELGQQILKGQMSLADLAKYAQEHNLSPVHQSGRQEQLENLVNHYLFDK

SEQ ID NO: 305 - protein, 439 aa, Bacteroides fragilis
MATKEYFPGIGKIKFEGKDSKNPMAFRYYDAEKMINGRSMKDWLKFAMAWWHTLCAEGGDQFGGGTKQFPWNGDPDPVQAAKNKMDAGFEFMQKMGIGYYCFHDVDLVTEADSIEAYEANLKELVAYAKQKQAETGIKLLWGTANVFSHARYMNGAATNPDFDVVARAAVQIKNAIDATIELGGTNYVFWGGREGYMSLLNTDQKREKEHLAQMLTIARDYGRARGFKGTFLIEPKPMEPTKHQYDVDTETVIGFLKAHGLNQDFKVNIEVNHATLAGHTFEHELAVAVDNGMLGSIDANRGDYQNGWDTDQFPIDNFELTQAMMQIIRNDGLGNGGTNFDAKTRRNSTDPEDIFIAHIAGMDAMARALESAANLLNESPYQKMLSDRYASFDAGKGKEFEEGKLSLEELVAYAKANGEPKQTSGQQELYEALVNIYSL

SEQ ID NO: 306 - protein, 438 aa, Pseudomonas fluorescens
MPYFPDIERIRYEGPASDSPLAFRHYDADKIILGKPMREHLRMAACYWHTFVWPGSDVFGAGTFKRPWQHAGDPMELAIGKAQAAFEFFSKLGIDYYCFHDTDVAPEGNSLKEYRNHFAQMIDHLERHQEESGIKLLWGTANCFSNPRFAAGAASNPDPEVFACAAAQVFSAMNATQRLKGANYVLWGGREGYETLLNTDLKREREQLGRFMRMVVEHKYKIGFKGDLLIEPKPQEPTKHQYDYDSATVFGFLQQFGLEKEIKVNIEANHATLAGHSFHHEVATAVSLGIFGSIDANRGDPQNGWDTDQFPNSVEEMTLVTYEILKAGGFGNGGFNFDSKVRRQSLDETDLFHGHVGAMDVLALSLERAAAMVQNDQLQRLKDQRYAGWQQPFGQSVLAGDFNLQSLAEHAFANELNPQAVSGRQEMLENVVNRFIYR

SEQ ID NO: 307 - protein, 440 aa, Escherichia coli
MQAYFDQLDRVRYEGSKSSNPLAFRHYNPDELVLGKRMEEHLRFAACYWHTFCWNGADMFGVGAFNRPWQQPGEALALAKRKADVAFEFFHKLHVPFYCFHDVDVSPEGASLKEYINNFAQMVDVLAGKQEESGVKLLWGTANCFTNPRYGAGAATNPDPEVFSWAATQVVTAMEATHKLGGENYVLWGGREGYETLLNTDLRQEREQLGRFMQMVVEHKHKIGFQGTLLIEPKPQEPTKHQYDYDAATVYGFLKQFGLEKEIKLNIEANHATLAGHSFHHEIATAIALGLFGSVDANRGDAQLGWDTDQFPNSVEENALVMYEILKAGGFTTGGLNFDAKVRRQSTDKYDLFYGHIGAMDTMALALKIAARMIEDGELDKRIAQRYSGWNSELGQQILKGQMSLADLAKYAQEHHLSPVHQSGRQEQLENLVNHYLFDK

SEQ ID NO: 308 - protein, 445 aa, Bacillus subtilis
MAQSHSSSINYFGSANKVVYEGKDSTNPLAFKYYNPQEVIGGKTLKEHLRFSIAYWHTFTADGTDVFGAATMQRPWDHYKGMDLAKMRVEAAFEMFEKLDAPFFAFHDRDIAPEGSTLKETNQNLDMIMGMIKDYMRNSGVKLLWNTANMFTNPRFVHGAATSCNADVFAYAAAQVKKGLETAKELGAENYVFWGGREGYETLLNTDLKFELDDLARFMHMAVDYAKEIGYTGQFLIEPKPKEPTAHQYDTDAATTIAFLKQYGLDNHFKLNLEANHATLAGHTFEHELRMARVHGLLGSVDANQGHPLLGWDTDEFPTDLYSTTLAMYEILQNGGLGSGGLNFDAKVRRSSFEPDDLIYAHIAGMDAFARGLKVAHKLIEDRVFEDVIQHRYRSFTEGIGLEIIEGRANFHTLEQYALNHKSIKNESGRQEKLKAILNQYILEV

SEQ ID NO: 309 - protein, 446 aa, Xanthomonas campestris
MSNTVFIGAKEYFPGIGKIGFEGRDSDNPLAFKVYDANKQVAGKTMAEHLRFAVAYWHSFCGNGADPFGPGTRAYPWDVGNTALARAEAKSDAAFEFFTKLGVPYYCFHDIDLAPDADDIGEYENNLKHMVGIAKQRQADTGVKLLWGTANLFSHPRYMNGASTNPDFNVVARAAVQVKAAIDATVELGGENYVFWGGREGYACLHNTQMKREQDNMARFLTLARDYGRAIGFKGNFLIEPKPMEPMKHQYDFDSATVIGFLRQHGLDQDFKLNIEANHATLSGHSFEHDLQVASDAGLLGSIDANRGNPQNGWDTDQFPTDLYDTVGAMLVVLRQGGLAPGGLNFDAKVRRESSDPQDLFLAHIGGMDAFARGLEVADALLTSSPLETWRAQRYASFDSGAGADFANGTSTLADLATYAAGKGEPTQLSGRQEAYENLINQYLTR

SEQ ID NO: 310 - protein, 438 aa, Pseudomonas syringae
MPYFPDVDRVRYEGPDSDSPLAFRHYDADKLVLGKPMREHLRMAACYWHTFVWPGADMFGVGTFKRPWQGSGDPMELAIGKAEAAFEFFSKLGIDYYSFHDTDVAPEGASLKEYRHNFAHMVDHLERHQQQSGIKLLWGTANCFSNPRFAAGAASNPDPEVFAYAATQVFSAMNATQRLKGSNYVLWGGREGYETLLNTDLKREREQLGRFMRMVVEHKHKIGFKGDLLIEPKPQEPTKHQYDYDSATVFGFLQQYGLENEIKVNIEANHATLAGHSFHHEIATAVSLGIFGSIDANRGDPQNGWDTDQFPNSVEEMTLATYEILKAGGFTNGGFNFDSKVRRQSLDDIDLFHGHVAAMDVLALALERAAAMLQNDKLQHFKDQRYAGWQQPFGQSVLAGEFSLASLAEHAFANELNPQAVSGRQELLEGVVNRFIYA

SEQ ID NO: 311 - protein, 436 aa, Sinorhizobium medicae
MSTGFFGDTAKIKYEGPESTNPLAFRHYNPDDVVLGKRMEDHLRFAVAYWHSFVWPGGDPFGGQTFERPWFKDSMEAAKLKADVAFEFFQLLGAPFYCFHDADVRPEGRNFAENTRNLNDIVDYFAKKQDESGVKLLWGTANLFSNRRFMAGAATNPDPDVFAFAAATVKTCIDATQRLGGENYVLWGGREGYETLLNTDLKRELDQLGRFLNLVVEYKHKIGFKGTILIEPKPQEPTKHQYDYDVATVYGFLKKYGLENEVKLNIEQGHAILAGHSFEHELALANALGVFGSIDMNRNDYQSGWDTDQFPNNVPEMALAYYHVLAGGGFKTGGTNFDAKLRRQSIDPEDLLIGHIGGMDCCARGLKAAAKMIEDKALSAPLEERYAGWNELEAQKMLQGGFSLEEIEARVLKADVNPQPKSGRQELLENVVNRYV

SEQ ID NO: 312 - protein, 435 aa, Ochrobactrum anthropi
MSTGFFGDIQKVKYEGPDSDSPLAFRHYNPDEIVLGKRMEDHLRFAVAYWHSFAWEGGDPFGGRTFDRPWYSNELDAAKLKADVAFEFFSLLGAPYYCFHDADVRPEGRNFAENTRYLNEIVDIFEKKQAETGVKLLWGTANLFSNRRYMGGAATNPDPDVFAFAAATVKSCIDATKRLGGENYVLWGGREGYETLLNTDLGRELDQMGRFLNLVVEYKHKIGFKGTILIEPKPQEPTKHQYDYDVATVYGFLKRYGLESEVKVNIEQGHAILAGHSFEHELALARALGIFGSIDMNRNDYQSGWDTDQFPNNVPEMALAYYQVLLAGGFTTGGTNFDAKLRRQSLDPQDLLIGHIGGMDCCARGLKAAAAMLEDGALSKPLDERYAGWNGDFGKKLLTGLSLDQITAEVETKDINPQPKSGRQEYLENVVNRYV

SEQ ID NO: 313 - protein, 440 aa, Burkholderia thailandensis
MSYFEHIPAIRYEGPQSDNPLAYRHYDRTKRVLGKTLEEHLRIAVCYWHTFVWPGQDVFGQGALRRPWQQPGEPLERARQKADAAFAFFTKLGTPFYTFHDTDVAPEGANLHEYVENFARMVDYLGEHQQASGVRLLWGTANLFSHPRFAAGAATSPNPDAFAWAATQVCHALDATHRLGGENYVLWGGREGYETLLNTDLAREREQLARFLAMVVEHKHRIGFTGALLIEPKPQEPTKHQYDYDVATVHGLLTQYGLQNEIRVNIEANHATLAGHSFHHEIANAFALGVFGSVDANRGDPQNGWDTDQFPNSVEELTLAFYEILRHGGFTTGGMNFDAKVRRQSVDPEDLFHGHIGAIDVLALALERAAVLVENDRLDALRRRRYAQWDSEFGRKILAGGYSLQSLAADALARGVNPQHASGAQERLENIVNQAIYALR

SEQ ID NO: 314 - protein, 440 aa, Salmonella enterica; identical to SEQ ID NO: 236

SEQ ID NO: 315 - protein, 444 aa, Thermotoga sp.
MMEFFPEIPKIQFEGKESTNPLAFKFYDPNEVIDGKPLKDHLKFSVAFWHTFVNEGRDPFGDPTAERPWNRFSDPMDKAFARVDALFEFCEKLNIEYFCFHDRDIAPEGKTLRETNKILDKVVERIKERMKDSNVKLLWGTANLFSHPRYMHGAATTCSADVFAYAAAQVKKALEITKELGGEGYVFWGGREGYETLLNTDLGLELENLARFLRMAVEYAKKIGFTGQFLIEPKPKEPTKHQYDFDVATAYAFLKNHGLDEYFKFNIEANHATLAGHTFQHELRMARILGKLGSIDANQGDLLLGWDTDQFPTNIYDTTLAMYEVIKAGGFTKGGLNFDAKVRRASYKVEDLFIGHIAGMDTFALGFKIAYKLAKDGVFDKFIEEKYRSFKEGIGKEIVEGKTDFEKLEEYIIDKEDIELPSGKQEYLESLLNSYIVKTIAELR

SEQ ID NO: 316 - protein, 445 aa, Bacillus cereus
MAQSSTNKVSYFESVNKVLYEGKGSKNPLAFKYYNPEEIVGDKTMKEQLRFSIAYWHTFTADGTDPFGAATMQRAWDKYDGMDLAKARVEAAFQLFEKLNVPFFAFHDRDIAPEGSTLRETNKNLDVIVTMIKDYMKTSNVKLLWNTANMFTNPRFVHGAATSCNADVFAYAAAQVKKGLETAKELGAENYVFWGGREGYDTLLNTNLKLELDNLARFMQMSVDYAKEIGYTGQFLIEPKPKEPTTHQYDTDAATTISFLRQYGLENHFKLNLEANHATLAGHTFEHELRVARVQGFLGSVDANQGNPLLGWDTDEFPTNLYSTTLAMYEILQNGGLGSGGLNFDAKVRRASFEEEDLVYAHIAGMDAFARGLKVAHKLLEDRVFENIIDERYHSFRDGIGLEIVEGRANFHTLEQYALQNSIIKNQSGKQERLKAILNQYILEV

SEQ ID NO: 317 - protein, 440 aa, Salmonella enterica; identical to SEQ ID NO: 236

SEQ ID NO: 318 - protein, 440 aa, Salmonella enterica
MQAYFDQLDRVRYEGPQSTNPLAFRHYNPDELVLGKRMEDHLRFAACYWHTFCWNGADMFGVGAFNRPWQQPGEALELAKRKADVAFEFFHKLNVPFYCFHDVDVSPKGASLKEYKNNFAQMVDVLAAKQEQSGVKLLWGTANCFTNPRYGAGAATNPDPEVFSCAATQVVTAMNATHKLGGENYVLWGGREGYETLLNTDLRQEREQIGRFMQMVVEHKHKMGFQGTLLIEPKPQEPTKHQYDYDVATVYGFLKQFGLEKEIKVNIEANHATLAGHSFHHEIATAIALGIFGSVDANRGDAQLGWDTDQFPISVEENALVMYEILKAGGFTTGGLNFDAKVRRQSTDKYDLFYGHIGAMDTMALSLKIAARMVEDGELDKRVAKRYAGWNGELGQQILKGQLSLGELAQYAEQHHLAPVHQSGHQELLENLVNRYLFDK

SEQ ID NO: 319 - protein, 435 aa, Enterococcus faecalis
MVYFPKIEKIKYEGTNTKNMYAFRHYNSEEIIMGKTMKEHLRFAVAYWHTMTQDGSDPFGKAVNKRSWLGESPMETAKKRVIAFFEILEKLDVEYFCFHDIDIAPEGNSLKEFFSNIDEITDLIKEKMDETGIKLLWNTANMFSNPRYVNGAASTNNANVYAIAAAQVKKGLDVSKKLGGENYVFWGGREGYETLLNTDMKFEQDNIARLFKMAIFYGEKIGHKPQFLIEPKPKEPSKHQYDFDAATTMAFILKYGLEKDFKLNLEANHATLAGHTFEHELNVARNYGALGSIDANQGDVLLGWDTDEFPTNVYDVTLAMYEILENGGIEPGGINFDSKVRRSSFEMEDLLLAHIAGMDTFARGLKSAMKLKEDRFFEDLKEQRYSSFKKGIGAKIISGKENLESLTNYALKNDEPIIESSHIEYVKNILNDYLY

SEQ ID NO: 320 - protein, 444 aa, Thermotoga neapolitana
MAEFFPEIPKVQFEGKESTNPLAFKFYDPEEIIDGKPLKDHLKFSVAFWHTFVNEGRDPFGDPTADRPWNRYTDPMDKAFARVDALFEFCEKLNIEYFCFHDRDIAPEGKTLRETNKILDKVVERIKERMKDSNVKLLWGTANLFSHPRYMHGAATTCSADVFAYAAAQVKKALEITKELGGEGYVFWGGREGYETLLNTDLGFELENLARFLRMAVDYAKRIGFTGQFLIEPKPKEPTKHQYDFDVATAYAFLKSHGLDEYFKFNIEANHATLAGHTFQHELRMARILGKLGSIDANQGDLLLGWDTDQFPTNVYDTTLAMYEVIKAGGFTKGGLNFDAKVRRASYKVEDLFIGHIAGMDTFALGFKVAYKLVKDGVLDKFIEEKYRSFREGIGRDIVEGKVDFEKLEEYIIDKETIELPSGKQEYLESLINSYIVKTILELR

SEQ ID NO: 321 - protein, 440 aa, Escherichia coli; identical to SEQ ID NO: 248

SEQ ID NO: 322 - protein, 439 aa, Photorhabdus luminescens
MHRYFERVNRISYEGRQSNNPLAFRHYNPEEIILGKKMKDHLRFAVCYWHNFCWDGTDMFGSGAFERFWQKGGDALELAKLKADVAFEFFYKLNIPFYCFHDIDVAPEGCSLKEYIYNLGVMSDILADKQAETGVKLLWGTANCFTHPRYAAGASTNPDLNIFAYASAQVCQVMQMTKKLGGENYVLWGGREGYESLLNTDLRQEREQIGRFMQMVVDYKYKIGFQGTLLIEPKPQEPTKHQYDYDVATVYGFLKQFGLENEIKVNIEANHATLAGHSFQHEVATAIALGILGSIDANRGDAQLGWDTDQFPNSVEENSLVMYEILKAGGFTTGGLNFDAKVRRQSIDIDDLFYGHIGAIDTMALSLKSAVKILVDGKLDEYVAQRYSGWNSELGRDILEGKMTLDEVAHYAETLVQEPKHRSGQQELLENLINRYIYD

SEQ ID NO: 323 - protein, 440 aa, Enterobacter sp.
MQAYFDQLDRVRYEGPKSTNPLAFRHYNPDELVLGKRMEDHLRFAACYWHTFCWNGADMFGVGSFDRPWQQPGEALELAKRKADVAFEFFHKLNVPYYCFHDVDVSPEGASLKEYLNNFAQMVDYLGEKQQQSGVKLLWGTANCFTNPRYGAGAATNPDPEVFSWAATQVVTAMNATHKLGGENYVLWGGREGYETLLNTDLRQEREQIGRFMQMVVEHKHKIGFRGTLLIEPKPQEPTKHQYDYDVATVYGFLKQFGLEKEIKVNIEANHATLAGHSFHHEIASAIALGIFGSVDANRGDPQLGWDTDQFPISVEENALVMYEIIKAGGFTTGGLNFDAKVRRQSTDKYDLFYGHIGAMDTMALALKVAARMIEDGELDKRVAKRYAGWNSELGQQILKGQLSLAEIAKYAEQHSLAPSHQSGHQELLENLVNHYLFDK

SEQ ID NO: 324 - protein, 440 aa, Burkholderia cenocepacia
MSYFEHIPAIRYEGPQSDNPLAYHHYDPDKRVLGKTLAEHLRIAVCYWHTFVWPGHDIFGQGAFQRPWQQPGDALERARQKADAAFEFFTKLGTPFYTFHDTDVAPEGDSLRDYAANFARMVDYLGERQHASGVRLLWGTANLFSHPRFAAGAATNPNPDVFAWAATQVCHALDATHRLGGENYVLWGGREGYETLLNTDLKRERDQFARFLSMVVEHKHRIGFKGALLIEPKPQEPTKHQYDYDVATVHGFLVQYGLQNEIRVNIEANHATLAGHSFHHEIANAFALGVFGSVDANRGDPQNGWDTDQFPNSVEELTLAFYEILRHGGFTTGGMNFDAKVRRQSIDPEDLFYGHVGAIDVLALALERAAVLVENDRLDALRRQRYAQWDDAFGRKILSGGYTLESLAADALARGVNPRHASGAQERLENIVNQAIYGLR

SEQ ID NO: 325 - protein, 448 aa, Bacillus licheniformis
MFFRNIGMIEYEGADSENPYAFKYYNPDEFVGGKTMKEHLRFAVAYWHTFDADGKDPFGDGTMFRAWNRLTHPLDKAKARAEAAFEFFEKLGVPYFCFHDVDIVDEGATLRETFTYLDQMSSFLKEMMETSHVQLLWNTANMFTHPRYVHGAATSCNADVYAYAAAKVKKGLDIAKELGAENYVFWGGREGYETLLNTDMKLELENLSSFYRMAVEYAREIGFDGQFLIEPKPKEPTKHQYDFDAATTIAFLETYGLKDHFKLNLEANHATLAGHTFEHELRVAALHDMLGSIDANQGDLLLGWDTDEFPTDLYSAVLAMYEILKAGGFKTGGINFDAKVRRPSFADEDLFHAHIAGMDTYAVGLKVASRLLEDKALDQVIEERYESYTKGIGLEIKEGRTDLKKLAAYALENDHIENQSGRQERLKATVNRYLLNALREAPAGKETH

SEQ ID NO: 326 - protein, 441 aa, Geobacillus stearothermophilus
MPYFDNISTIAYEGPASKNPLAFKFYNPEEKVGDKTMEEHLRFSVAYWHTFTGDGSDPFGAGNMIRPWNKYSGMDLAKARVEAAFEFFEKLNIPFFCFHDVDIAPEGETLKETYKNLDIIVDMIEEYMKTSKTKLLWNTANLFTHPRFVHGAATSCNADVFAYAAAKVKKGLEIAKRLGAENYVFWGGREGYETLLNTDMKLELDNLARFLHMAVDYAKEIGFDGQFLIEPKPKEPTKHQYDFDVATALAFLQTYGLKDYFKFNIEANHATLAGHTFEHELRVARIHGMLGSVDANQGDMLLGWDTDEFPTDLYSTTLAMYEILKNGGLGRGGLNFDAKVRRGSFEPEDLFYAHIAGMDSFAVGLKVAHRLIEDRVFDEFIEERYKSYTEGIGREIVEGTADFHKLEAHALQLGEIQNQSGRQERLKTLLNQYLLEVCAAR

SEQ ID NO: 327 - protein, 435 aa, Brucella abortus; identical to SEQ ID NO: 258

SEQ ID NO: 328 - protein, 436 aa, Rhizobium leguminosarum
MSTGFFGDIQKVKYEGPDSTNPLAFRHYQPDEIVMGKRMEDHLRFAVAYWHTFTWPGGDPFGGQTFLRPWFEDTMKAAKLKADVAFEFFSLLGSPYYCFHDADVRPEGKTFAENTKNLNEIVDYFAEKQAATGTKLLWGTANLFSHRRYMSGAATNPDPDVFAFAAATVKTCIDATQKLGGENYVLWGGREGYETLLNTDIGRELDQLGRFLNLVVEYKHKIGYKGTILIEPKPQEPTKHQYDYDVATVYGFLKKHGLENEVKLNIEQGHAILAGHSFEHELALANALGIFGSIDMNRNDYQSGWDTDQFPNNVPEMALAYYHVLAGGGFKTGGTNFDSKLRRQSLDPADLLIGHIGGMDCCARGLKAAAKMIEDKALSQPLADRYAGWESAEAQKLFRGEYSLDEITHYVESHDVNPQPRSGKQELLENVVNRYV

SEQ ID NO: 329 - protein, 439 aa, Yersinia enterocolitica
MQSYFDELEQVRYEGSQNTNPLAFHHYNPDEIILGKRMADHLRFAACYWHTFCWGGADMFGSNAFERPWQQSGDALALAKRKADVAFEFFHKLNVPYYCFHDVDVSPEGASLKEYLNNFAVMTDVLAEKQASSGVKLLWGTANCFTHPRYGAGAATNPDPEVFSWAATQVFTAMNATQKLGGENYVLWGGREGYETLLNTDLRQEREQIGRFMQMVVEHKHKTGFQGTLLIEPKPQEPTKHQYDYDVATVYGFLKQFGLEKEIKVNIEANHATLAGHSFHHEIASAIALGIFGSVDANRGDPQLGWDTDQFPNSVEENALVMFEILKAGGFTTGGLNFDAKVRRQSTDKYDLFYGHIGAMDTMALALKIAAKMIEDGQLDKQVAERYAGWSSDLGQQILKGKMSLEDLASYAEQHNLNPHHQSGHQELLENRVNRYIFG

SEQ ID NO: 330 - protein, 439 aa, Serratia proteamaculans
MQSYFDQLEQVHYEGPTSNNPLAFHHYNPDELVLGKRMAEHLRFAACYWHTFCWNGADMFGVGSFDRPWQQPGDALTLAKRKADVAFEFFHKLNVPYYCFHDVDVSPEGASLKEYLHNFAVMTDVLEEKQHSSGVKLLWGTANCFTHPRYGAGAATNPDPEVFSWAATQVFTAMNATQRLGGENYVLWGGREGYETLLNTDLRQEREQIGRFMQMVVEHKHKTGFQGTLLIEPKPQEPTKHQYDYDVATVYGFLKQFGLEKEIKVNIEANHATLAGHSFHHEIATAIALGIFGSVDANRGDPQLGWDTDQFPISVEENALVMFEILKAGGFTTGGLNFDAKVRRQSTDKYDLFYGHIGAMDTMALALKVAAKMVTDGQLHQQVSKRYAGWNGELGQQILQGKLSLEALAQYAEGHALAPQHVSGRQEQLENLMNRYLFG

SEQ ID NO: 331 - protein, 439 aa, Yersinia pseudotuberculosis; identical to SEQ ID NO: 261

SEQ ID NO: 332 - protein, 440 aa, Escherichia coli
MQAYFDQLDRVRYEGSKSSNPLAFHHYNPDELVLGKRMEEHLRFAACYWHTFCWNGADMFGVGAFNRPWQQPGEALALAKRKADVAFEFFHKLHVPFYCFHDVDVSPEGASLKEYINNFAQMVDVLAGKQEESGVKLLWGTANCFTNPRYGAGAATNPDPEVFSWAATQVVTAMEATHKLGGENYVLWGGREGYETLLNTDLRQEREQLGRFMQMVVEHKHKIGFQGTLLIEPKPQEPTKHQYDYDAATVYGFLKQFGLEKEIKLNIEANHATLAGHSFHHEIATAIALGLFGSVDANRGDAQLGWDTDQFPNSVEENALVMYEILKAGGFTTGGLNFDAKVRRQSTDKYDLFYGHIGAMDTMALALKIAARMIEDGELDKRIAQRYSGWNSELGQQILKGQMSLADLAKYAQEHNLSPVHQSGRQEQLENLVNHYLFDK

SEQ ID NO: 333 - protein, 439 aa, Yersinia pestis
MQSYFNELEQVRYEGSQSTNPLAFHHYNPDEMILGKRMADHLRFAACYWHTFCWGGADMFGANAFDRPWQQPGDALALAKRKAKVAFEFFHKLNVPYYCFHDVDVSPEGASLQEYLNNFAVMTDVLAEKQAASGVKLLWGTANCFTHPRYGAGAATNPDPEVFSWAATQVFTAMNATRQLGGENYVLWGGREGYETLLNTDLRQEREQIGRFMQMVVEHKHKTGFQGTLLIEPKPQEPTKHQYDYDVATVYGFLKQFGLEKEIKVNIEANHATLAGHSFHHEIASAIALGIFGSVDANRGDPQLGWDTDQFPNSVEENTLVMFEILKAGGFTTGGLNFDAKVRRQSTDKYDLFYGHIGAMDTMALALKFAAKMIEDGQLDQIVAKRYAGWNSELGQQILQGKMSLEELSRYASQHNLNPQHQSGHQELLENKVNRYLFG

SEQ ID NO: 334 - protein, 433 aa, Fervidobacterium gondwanense
MYFNVEKVVYEGPSSKNLLAYKFYNPEEEIAGKKMRDWFRFAVAYWHTFNSRGEDPFGSATFERPWFKKDPMDTAFAKVDALFEFCEKTGVEYFTFHDRDLAHEGLTLRESNKILDKVVEKIKEYMKSSNVKLLWGTANLFSHPRYAQGAATSPNPLVFSYAASQVKKMLDVTKELGGLGYVLWGGREGYDNLLLTDSALEEKLFARFLEMVVEYKERIGFNGVLMIEPKPKEPTKHQYDFDASTVLYFLKKHNLFEHFKLNIEANHATLAGHTFAHELRVARLNGKLGSIDANRGDLLLGWDTDQFPTDVYETTFAMYEVLENNGLDCGFNFDAKVRRASIDPEDIVYAHVSSMDAFALGLKLAVKLREKVKPMIEERYSEYNSEIGMKILEGKTTLDELSSYVEDLTDVRVKSLKQELLEMVINDVIFGGR

SEQ ID NO: 335 - protein, 446 aa, Xanthomonas campestris; identical to SEQ ID NO: 309

SEQ ID NO: 336 - protein, 436 aa, Rhizobium leguminosarum
MSTGFFGDIQKVKYEGPDSTNPLAFRYYQPDEIVMGKRMEDHLRFAVAYWHTFTWPGGDPFGGQTFLRPWFEDTMKAAKLKADVAFEFFSLLGSPYYCFHDADVRPEGKNFAENTKNLNEIVDYFAEKQASTGTKLLWGTANLFSNRRYMSGAATNPDPDVFAFAAATVKTCIDATQKLGGENYVLWGGREGYETLLNTDLKRELDQLGRFLNLVVEYKHKIGYTGTILIEPKPQEPTKHQYDYDVATVYGFLKKHGLENEVKLNIEQGHAILAGHSFEHELALANALGIFGSIDMNRNDYQSGWDTDQFPNNVPEMALAYYHVLAGGGFKTGGTNFDSKLRRQSLDPADLLIGHIGGMDCCARGLKAAARMIEDKALSQPLADRYAGWESAEAQKLFRGEYSLDEITNWVETKDVNPQPRSGKQELLENVVNRYV

SEQ ID NO: 337 - protein, 438 aa, Bradyrhizobium japonicum
MSAKFFEESTPVAFAGQDAGPAPAFRWYDKDRLVHGRRLEDHLRFAVCYWHSLCWPGGDPFGGETFLRPWHHGTDAMAQARAKADVAFELFRLLDVPFFTFHDVDAAPEGASLAESVANLNAIADLFEAKMASAKVRLLWGTANLFTHRRYMAGAATNPDPDIFTYAAGQVRAALEVTHRLGGQNYVLWGGREGYETLLNTDLKRELDQLGRFVSLVVEHKHKIGFNGPILIEPKPKEPTKHQYDFDVATCYGFLARYDLLKDVKLNIEQNHAILAGHSFHHEVALAEALGVFGSLDVNRGDDLLGWDTDQFAMNVPELALVFHEILNRGGFTSGGLNFDAKIRRQSIDPDDLIHAHVGSMDACARAFLAAADMLDAGALTAPLDKRYEGWAGPEGRAILGGQRSLADLADRALGPGFDPQPRSGRQEYLESLVNRYV

SEQ ID NO: 338 - protein, 436 aa, Mesorhizobium sp.
MSTGFFGNLQPISYEGPQSDNPLAFRHYNPDEVVLGKRLEDHLRFAVCYWHTFVWPGGDPFGGQTFERPWFGDTMERARLKADVAFELFEILGVPFFTFHDADVRPEGASYSESVARLNDIADYIAAKMEKTGVRLLWGTANLFSHRRFMAGAATNPDPDVFAYAAATVKACIDVTKRLNGENYVLWGGREGYETLLNTDLGRELDQLGRFLSMVVDYKHRIGFKGAILIEPKPQEPTKHQYDFDVGTVYGFLKRYGLEDEVKVNIEQGHALLAGHSFEHELALAATLGIFGSIDMNRNDYQSGWDTDQFPNNAPEAALAYYYILQAGGFTTGGTNFDAKLRRQSLDPEDLVAAHIGGMDICAQGLKAAARMIEDKALSGPLEERYSGWNATEAQAMLKGERSLEAIAERVARENLDPKPRSGRQEKLENIINRYV

SEQ ID NO: 339 - protein, 439 aa, Actinobacillus pleuropneumoniae; identical to SEQ ID NO: 255

SEQ ID NO: 340 - protein, 439 aa, Yersinia pseudotuberculosis; identical to SEQ ID NO: 261

SEQ ID NO: 341 - protein, 446 aa, Xanthomonas campestris; identical to SEQ ID NO: 287

SEQ ID NO: 342 - protein, 440 aa, Burkholderia cenocepacia
MSYFEHIPAIRYEGPQSDNPLAYHHYDPDKRVLGKTLAEHLRIAVCYWHTFVWPGHDIFGQGAFQRPWQQPGDALERARQKADAAFEFFTKLGTPFYTFHDTDVAPEGDSLRDYAANFARMVDYLGERQQASGVRLLWGTANLFSHPRFAAGAATNPNPDVFAWAATQVCHALDATHRLGGENYVLWGGREGYETLLNTDLKRERDQFARFLSMVVEHKHRIGFKGALLIEPKPQEPTKHQYDYDVATVHGFLVQYGLQNEIRVNIEANHATLAGHSFHHEIANAFALGVFGSVDANRGDPQNGWDTDQFPNSVEELTLAFYEILRHGGFTTGGMNFDAKVRRQSIDPEDLFYGHVGAIDVLALALERAAVLVENDRLDALRRQRYAQWDDAFGRKILSGGYTLESLAADALARGVNPRHASGAQERLENIVNQAIYGLR

SEQ ID NO: 343 - protein, 439 aa, Oceanobacillus iheyensis
MSYFNEIGTIQYEGAKSDNPFAFKFYNPTESINGQTMEEHLRFGVAYWHTFTEDLSDPFGNGTAIRPWDKFNGMDLAKARVEAAFEFFEKLQIPYFCFHDVDIAPEGSSLKESNENLDTVVAMIKEYMKDSKTKLLWNTVNNFTHPRFVHGAASSNNADVFAYAAAKVKKGLEVGKELGAENYVFWGGREGYETLLNTNMKLELDNLARFFHMAKDYANEIDFNAQFLIEPKPKEPTSHQYDFDVASGYAFLQNYDLQDTFKFNIEANHATLAGHTFEHELHYARIHNMLGSVDANQGHPLLGWDTDEFPSDIYTTTLAMYEILKNDGLGKGGLNFDAKVRRGSFTAEDLFHAHIAGMDSFAIGLKVAQRLMDDRVLENVVEDRYRSFNQGIGRDIVSGKTDFHQLEKHALTLSEITQPSGQLEVIKNKINQYLLTTFA

SEQ ID NO: 344 - protein, 435 aa, Brucella suis
MSTGFFGDIQKVRYEGPESDNLLAFRHYNADEIVLGKRMQDHLRFAVAYWHSFAWEGGDPFGGRTFDRPWFSNEIDAAKLKADVAFEFFSLLGAPYYCFHDADVRPEGRNFAENTRYLNEIVDIFEKKQAETGMKLLWGTANLFSNRRYMAGAATNPDPDVFAFAAATVKTCIDATKRLGGENYVLWGGREGYETLLNTDLSRELDHMGRFLSLVVEYKHKIGFKGTILIEPKPQEPTKHQYDYDVATVYGFLKRYGLENEVKVNIEQGHAILAGHSFEHELALARTLGIFGSIDMNRNDYQSGWDTDQFPNNVPEKALAYYQVLLAGGFTTGGTNFDAKLRRQSLDPQDLLIGHIGGMDCCARGLKAAARMLEDGALSKPLDERYAGWNGEFGKRLLSGLSLDQIAGEVEAKDINPQPKSGRQEYLENIVNRYV

SEQ ID NO: 345 - protein, 439 aa, Thermoanaerobacterium thermosaccharolyticum
MSKYFEKVSKIKYEGPKSNNPYAFKFYNPEEVIDGKTMEEHLRFSIAYWHTFTADGTDQFGKATMQRPWNHLTDPMDIAKARVEAAFEFFDKINAPFFCFHDRDIAPEGDTLRETNKNLDIIVAMIKDYLKTSKTKVLWGTANLFSNPRFVHGASTSCNADVFAYSAAQVKKALEITKELGGQNYVFWGGREGYETLLNTDMELELDNFARFLHMAVDYAKEIGFEGQFLIEPKPKEPTKHQYDFDVANVLAFLRKYDLDKYLKVNIEANHATLAAHDFQHELRYARINGVLGSIDANTGDMLLGWDTDQFPTDIRMTTLAMYEVIKMGGFDKGGLNFDAKVRRASFEPEDLFLGHIAGMDAFAKGFKVAYKLVKDAEFDKFIEERYASYKDGIGADIVSGKADFKSLEKYALEHSEIVTNQVDKKCLNQYSIQYLFTE

SEQ ID NO: 346 - protein, 441 aa, Burkholderia phymatum
MSYFEHLPAVRYEGPQTDNPFAYRHYDKDKLVLGKRMEDHLRVAVCYWHTFVWPGADMFGPGTFERPWHHAGDALEMAHAKADHAFELFSKLGTPFYTFHDLDVAPEGDSIKSYVNNFKAMTDVLARKQEQTGIKLLWGTANLFSHPRYAAGAATNPNPDVFAFAATQVLNALEATQRLGGANYVLWGGREGYETLLNTDLKREREQLGRFMSMVVEHKHKTGFKGALLIEPKPQEPTKHQYDYDVATVHGFLTQFGLQDEIRVNIEANHATLAGHSFHHEIANAFALGIFGSVDANRGDAQNGWDTDQFPNSVEELTLAFYEILRNGGFTTGGMNFDAKVRRQSIDPEDIVHGHIGAIDVLAVALERAAHLIEHDRLAAFKQQRYAGWDSDFGRKILAGGYSLESLASDAVQRNIAPRHVSGQQERLENIVNQAIFSSAK

SEQ ID NO: 347 - protein, 439 aa, Yersinia pseudotuberculosis; identical to SEQ ID NO: 261

SEQ ID NO: 348 - protein, 441 aa, Bacillus sp.
MPYFDNISTIAYEGPASKNPLAFKFYNPEEKVGDKTMEEHLRFSVAYWHTFTGDGSDPFGAGNMIRPWNKYSGMDLAKARVEAAFEFFEKLNIPFFCFHDVDIAPEGETLKETYKNLDIIVDMIEEYMKTSKTKLLWNTANLFTHPRFVHGAATSCNADVFAYAAAKVKKGLEIAKRLGAENYVFWGGREGYETLLNTDMKLELDNLARFLHMAVDYAKEIGFDGQFLIEPKPKEPTKHQYDFDVATALAFLQTYGLKDYFKFNIEANHATLAGHTFEHELRVARIHGMLGSVDANQGDMLLGWDTDEFPTDLYSTTLAMYEILKNGGLGRGGLNFDAKVRRGSFEPEDLFYAHIAGMDSFAVGLKVAHRLIEDRVFDEFIEERYKSYTEGIGREIVEGTVDFHKLEAHALQLGEIQNQSGRQERLKTLLNQYLLEVCAAR

SEQ ID NO: 349 - protein, 389 aa, Lactococcus lactis
MAYFNDIAPIKYEGTKTKNMFAFRHYNPEEVVAGKTMEEQLHFALAFWHTITMDGADPFGSATMERPWDLEGGSELDRAHRRVDAFFEIAEKLGVKYYCFHDIDIAPTGNSLKEFYANLDEITDHLLEKQKETGIKLLWNTANMFSNPRYMNGVSTSNRAEVFAYGAAQVKKGLELSKKLGGENYVFWGGREGYESLLNTDMGLEMDHMAKFFHLAIDYAKSINHLPIFLIELKPKEPMTHQYDFDAATALAFLQKYDLDKYFKLNIETNHAWLAGHTFEHELNTARTFGALGSIDANQGNYLLGWDTDEFPTLVIDITLQGWILMHVRLKVQQPSLKTNSCLISLKNVIVHTRRQKLVNLSKMEQQLLKVLLLMLLSMGMTSNLILTT

SEQ ID NO: 350 - protein, 437 aa, Novosphingobium aromaticivorans
MSADYFADFQTVRYEGPDSDNDFAYRWYDKDRVILGKRMEDHLRFAVCMWHTFCWPGSDVFGAGTFTRPWLQGPMDARNAAAKREAALAFVEKLDVPFYCFHDVDVMAEAEGIGEFRSSFAEAVDHLEELQGKHGRKLLWGTANLFGHPRYMAGAATNPDPEVFAWGASQVRDALEATHRLGGANYVLWGGREGYDSILNTEIGIEQENFGRFLSLVVDHKHRIGFKGTILIEPKPHEPTKHQYDFDTQTVFGFLKRFGLESEVKVNIEANHATLSGHTFEHELAMARALGILGSIDANRGDHQNGWDTDQFPNSVEELTLAMLELIRAGGFTDGGFNFDAKVRRQSIDAADLFHGHIGGIDTIAHALVKAAALIEDGKLDAFRAERYAGWQGELGRKIHADGTTLADIADIAVARDLAPVRRSGRQEWCENLINRV

SEQ ID NO: 351 - protein, 449 aa, Lactobacillus brevis
MTEEYWKGVDKIQYVGHQDKKSGLGFQYYNPEEEIMGKKMKDWLRFAVAYWHTFDQRLVDPFGDGTAQRPYDKYTDPMDLALAKVDAAFEFYQKLGVDYLCFHDRDLAPEGDTLRETNANLDKVVDKIVEYQKTSGMKVLWNTSNMFTNPRFVEGAATSPYADVFAYSAAQLKHSLEIGKRVGSENYVFWGGREGYESLWNTNMKQEQEHAAKIFHMAKDYANEIGFDAQMLLEPKPKEPTTHQYDFDAATTIAFMKEYDLDKDFKLNLEGNHANLAGHTYQHEIRVAREAGLLGSLDANQGDKLIGWDIDEYPSNLYETTAAMYEVVENGSIGPRGGLNFDAKPRRSAFAPEDLFLGHIVGMDSFAAGLRVAAAMKQDGFLDNLKADRYSSYKSGVGADIESGKADLKSLEAYAIDKPQSELIAATHSDHLEEIKDTINHYIIDTLSK

SEQ ID NO: 352 - protein, 441 aa, Mesorhizobium loti
MSSGFFGDIQKIKYEGPDSTNPLAYRFYNPDEVVAGKRLEDHLRFAVAYWHSFAWPGGDPFGGQTFDRPWFPKAGGIDTMELAKLKADVAFEMFSLLGAPYFCFHDADVRPEGKDFSESAARLDEIADYFAGKMKQTGVKLLWGTANLFSHRRFMSGAATNPDPDVFAYAAATVKSCIDVTKRLKGENYVLWGGREGYETLLNTDLAREQEQAGRFLSLVVDYKHKIGFKGTILIEPKPQEPTKHQYDYDVATVYGFLKRFGLEKEVKLNIEQGHAILAGHSFEHELALANALGVFGSIDMNRNDYQSGWDTDQFPNNVPEMALAYYQILQAGGFKTGGTNFDAKLRRQSLDPQDLLIGHIGGMDACARGLKAAARMVEDKALSAPLAERYAGWNSAEGKAMLSGKRTLEDIAERVVKKKIEPQPRSGRQELLENIVNRYV

SEQ ID NO: 353 - protein, 440 aa, Escherichia coli; identical to SEQ ID NO: 248

SEQ ID NO: 354 - protein, 440 aa, Burkholderia cenocepacia; identical to SEQ ID NO: 342

SEQ ID NO: 355 - protein, 439 aa, Thermoanaerobacterium thermosulfurigenes
MNKYFENVSKIKYEGPKSNNPYSFKFYNPEEVIDGKTMEEHLRFSIAYWHTFTADGTDQFGKATMQRPWNHYTDPMDIAKARVEAAFEFFDKINAPYFCFHDRDIAPEGDTLRETNKNLDTIVAMIKDYLKTSKTKVLWGTANLFSNPRFVHGASTSCNADVFAYSAAQVKKALEITKELGGENYVFWGGREGYETLLNTDMEFELDNFARFLHMAVDYAKEIGFEGQFLIEPKPKEPTKHQYDFDVANVLAFLRKYDLDKYFKVNIEANHATLAFHDFQHELRYARINGVLGSIDANTGDMLLGWDTDQFPTDIRMTTLAMYEVIKMGGFDKGGLNFDAKVRRASFEPEDLFLGHIAGMDAFAKGFKVAYKLVKDRVFDKFIEERYASYKDGIGADIVSGKADFRSLEKYALERSQIVNKSGRQELLESILNQYLFAE

SEQ ID NO: 356 - protein, 444 aa, Thermotoga petrophila
MMEFFPEIPKIQFEGKESTNPLAFKFYDPNEVIDGKPLKDHLKFSVAFWHTFVNEGRDPFGDPTAERPWNRFSDPMDKAFARVDALFEFCEKLNIEYFCFHDRDIAPEGKTLRETNKILDKVVERIKERMKDSNVKLLWGTANLFSHPRYMHGAATTCSADVFAYAAAQVKKALEITKELGGEGYVFWGGREGYETLLNTDLGLELENLARFLRMAVEYAKKIGFTGQFLIEPKPKEPTKHQYDFDVATAYAFLKNHGLDEYFKFNIEANHATLAGHTFQHELRMARILGKLGSIDANQGDLLLGWDTDQFPTNIYDTTLAMYEVIKAGGFTKGGLNFDAKVRRASYKVEDLFIGHIVGMDTFALGFKIAYKLVKDEVLDRFIEEKYRSFKEGIGKEIVEGKADFEKLEEYIIDKEDIELPSGKQEYLESLLNSYIVKTIAELR

SEQ ID NO: 357 - protein, 449 aa, Lactobacillus pentosus
MTNEYWQGVDQIKYIGHQDKKSGLGFQYYNPDEVIGGKKMRDWLRFSVAYWHTFDQRLVDPFGDGTAQRPYDHITDPMDLALAKVDAAFEFYHKLGVDYLCFHDRDLAPEGDTLRETNRNLDKVIDKIVDYQKQTGMKVLWNTSNMFTNPRFVAGAATSPDADVFAYAAAQLKHSLEIGKRVGAENYVFWGGREGYESLWNTNMKLEQEHAAKFFHMAKDYANEIGFDAQMLLEPKPKEPSTHQYDFDAATTIAFMKEYDLDKDFKLNLEGNHANLAGHTYQHEIRVAREANLLGSLDANQGDKLIGWDIDEFPSDLYEATAAMYEVVENGSIGPRGGLNFDAKPRRSSFAANDLFYGHIVGIDTFAAGLRVALKMKQDGFLEKLVADRYSSYQSGVGAEIEAGTADFKSLESYAIDKPQSELIAATSSDPLEEVKDTINHYIIETLSK

SEQ ID NO: 358 - protein, 439 aa, Lactococcus lactis
MAYFNDIAPIKYEGTKTKNMFAFRHYNPEEVVAGKTMEEQLHFALAFWHTITMDGSDPFGGATMERPWDLEGGSELDRAHRRVDAFFEIAEKLGVKYYCFHDIDIAPTGNSLKEFYANLDEITDHLLEKQKATGIKLLWNTANMFSNPRYMNGVSTSNRAEVFAYGAAQVKKGLELSKKLGGENYVFWGGREGYESLLNTDRGLEMDHMAKFFHLAIDYAKSINHLPIFLIEPKPKEPMTHQYDFDAATALAFLQKYDLDKYFKLNLETNHAWLVGHTFEHELNTARTFNALGSIDANQGNYLLGWDTDEFPTLVIDITLAMHQILLNGGLGKGGINFDAKVRRTSFKAEDLILAHIAGMDTYARALKGAAAIIEDKFLSDIVDERYTSYKNTEVGQSIENGTATFESLAAFALEHGDDIELDSNHLEYIKSVLNDYLV

SEQ ID NO: 359 - protein, 438 aa, Ruminococcus flavefaciens
MEFFSNIGKIQYQGPKSTDPLSFKYYNPEEVINGKTMREHLKFALSWWHTMGGDGTDMFGCGTTDKTWGQSDPAARAKAKVDAAFEIMDKLSIDYYCFHDRDLSPEYGSLKATNDQLDIVTDYIKEKQGDKFKCLWGTAKCFDHPRFMHGAGTSPSADVFAFSAAQIKKALESTVKLGGNGYVFWGGREGYETLLNTNMGLELDNMARLMKMAVEYGRSIGFKGDFYIEPKPKEPTKHQYDFDTATVLGFLRKYGLDKDFKMNIEANHATLAQHTFQHELRVARDNGVFGSIDANQGDVLLGWDTDQFPTNIYDTTMCMYEVIKAGGFTNGGLNFDAKARRGSFTPEDIFYSYIAGMDAFALGFRAALKLIEDGRIDKFVADRYASWNTGIGADIIAGKADFASLEKYALEKGEVTASLSSGRQEMLESIVNNVLFSL

SEQ ID NO: 360 - protein, 440 aa, Burkholderia phytofirmans
MSYFEHIPEIRYEGPQSDNPLAYRHYDKSKKVLGKTLEEHLRIAVCYWHTFVWPGVDIFGQGTFRRPWQQAGDAMERAQQKADSAFEFFSKLGTPYYTFHDTDVSPEGSNLKEYSENFLRITDYLARKQESTGIKLLWGTANLFSHPRYAAGAATSPDPEVFAFAATQVRHALDATQRLGGDNYVLWGGREGYDTLLNTDLVRERDQLARFLHMVVDHAHKIGFKGSLLIEPKPQEPTKHQYDYDVATVHGFLLQHGLDKEIRVNIEANHATLAGHSFHHEIATAYALGIFGSVDANRGDPQNGWDTDQFPNSVEELTLAFYEILKHGGFTTGGMNFDSKVRRQSVDPEDLFYGHIGAIDNLALAVERAAVLIENDRLDQFKRQRYSGWDAEFGRKISSGDYSLSALAEEAMARGLNPQHASGHQELMENIVNQAIYSGR

SEQ ID NO: 361 - protein, 440 aa, Salmonella enterica; identical to SEQ ID NO: 292

SEQ ID NO: 362 - protein, 449 aa, Lactobacillus brevis
MTEEYWKGVDKIQYVGHQDKKSGLGFQYYNPEEEIMGKKMKDWLRFAVAYWHTFDQRLVDPFGDGTAQRPYDKYTDPMDLALAKVDAAFEFYQKLGVDYLCFHDRDLAPEGDTLRETNANLDKVVDKIVEYQKTSGMKVLWNTSNMFTNPRFVEGAATSPYADVFAYSAAQLKHSLEIGKRVGSENYVFWGGREGYESLWNTNMKQEQEHAAKIFHMAKDYANEIGFDAQMLLEPKPKEPTTHQYDFDAATTIAFMKEYDLDKDFKLNLEGNHANLAGHTYQHEIRVAREAGLLGSLDANQGDKLIGWDIDEYPSNLYETTAAMYEVVENGSIGPRGGLNFDAKPRRSSFAPEDLFLGHIVGMDSFAAGLRVAAAMKQDGFLDSLKADRYSSYKSGVGADIESGKADLKSLEAYAIDKPQSELIAATHSDHLEEIKDTINHYIIDTLSK

SEQ ID NO: 363 - protein, 440 aa, Burkholderia ambifaria
MSYFEHIPAIRYEGPQSDNPLAYHHYDAEKRVLGKTLAEHLRIAVCYWHTFVWPGHDIFGQGAFQRPWQQPGDALERARLKADAAFEFFTKLGTPFYTFHDTDVAPEGDSLREYAANFARMVDYLGERQQASGVRLLWGTANLFSHPRFAAGAATNPNPDVFAWAAAQVCHALDATHRLGGENYVLWGGREGYETLLNTDLKRERDQFARFLSMVVEHKHRIGFKGALLIEPKPQEPTKHQYDYDVATVHGFLVQYGLQNEIRVNIEANHATLAGHSFHHEIANAFALGVFGSVDANRGDPQNGWDTDQFPNSVEELTLAFYEILRHGGFTTGGMNFDAKVRRQSVDPEDLFYGHVGAIDVLALALERAAVLVENDRLDALRRQRYAQWDDAFGQKILSGGYTLQSLAEDALARGVDPRHASGAQERLENIVNQAIYGLR

SEQ ID NO: 364 - protein, 440 aa, Salmonella enterica; identical to SEQ ID NO: 292

SEQ ID NO: 365 - protein, 440 aa, Bacillus halodurans
MTFFNDVEKVQYEGPRSTNPYAFKYYNPEEIVAGKTMAEHLRFSIAYWHTFVGDGSDPFGVGTMQRPWDQYSGMDLAKARVEAAFEFFEKLNVPYFCFHDVDVAPEGETLADTYKNLDEIVLMIKDYMKTSKTKLLWNTANMFTHPRWIHGAATSPNADVYAYAAAKVKKGLEIGKELGAENYVFWGGREGYETLLNTNMKLELDNLARFFHMAVDYAKEIGFDAQFLIEPKPKEPTKHQYDFDVATGIAFLKTHGLDEHFKFNIEANHATLAGHTFEHELHLARIHDMLGSVDANQGDTLLGWDTDEFPTDLYTTTLAMYEILKNDGLGKGGLNFDAKVRRGSFEANDLFHAHIAGMDSFAIGLKVANQLLEDRVLEDVIDNRYKSYQSGIGQKIANNDTNLKELEAYALSLGEIKHSSGQQERIKATLNQYLLRVNEY

SEQ ID NO: 366 - protein, 439 aa, Bacillus clausii
MSYFPAVNHISYEGAKSDNPFAFKFYNPDEIVSGKTMAEHLRFSIAYWHTFTEALSDPFGAGTAIRPWNAYTGMDLAKARVEAAFEFFEKINVPYFCFHDVDIAPEGSSLKETYANLDVIVAMIKDYMKDSNTKLLWNTANNFTHPRFVGGAASSNEADVFAYSAAKVKKGLEIGKELGAENYVFWGGREGYESLLNTDLKLEMDNLGRFFHMAVDYAKEIGFDGQFLIEPKPKEPTTHQYDFDVATGYAFLQHYGLQDSFKFNIEANHATLAGHTFEHELRYARIHHMLGSVDANQGDPLLGWDTDEFPTDLYSTTLAMYEILQNGGLGRGGLNFDAKVRRGSFEADDLFFAHIAGMDSFAIGLKVAQQLIDDRVLEQFVDSRYQSYKEGIGREIVLGNTDFHQLEAHALSLGEIKTRSGRVERIKAIINQYLLNAFA

SEQ ID NO: 367 - protein, 439 aa, Marinomonas sp.
MSEFFKTVPVVKYEGADSSNPFAFKHYDANKMLMGKTMAEHLRVAVCYWHTFCWQGSDVFGANTFDRPWSKAASEMEAAKLKTDAAFEFFTKLGVPYYSFHDVDVSPEGRSIKEYINNFAQMVDVLQAKQEATGIKLLWGTANAFSNPRYMSGAASNPNPEIFAYAATQVFHAMNATKALKGENYVLWGGREGYETLLNTDLKRERAQLGRFMQMVVEHKYKIGFEGTLLIEPKPAEPTKHQYDYDTATVYGFLKEFGLEKEIKVNIEANHATLAGHSFHHEIATACSLGILGSVDANQGDAQLGWDTDQFPTSVEEYTLVTYEILKSGGFKTGGYMFDTKLRRQSMDLEDLFHGHIGAMDTLALSLERAVKMIEDEKLANIVDQRYAKWNDSLGADILAGKHTLQDLAEYAEKNNIDPQPVSGRQEMLENMVNGYIFK

SEQ ID NO: 368 - protein, 439 aa, Yersinia pseudotuberculosis; identical to SEQ ID NO: 261

SEQ ID NO: 369 - protein, 439 aa, Actinobacillus pleuropneumoniae; identical to SEQ ID NO: 255

SEQ ID NO: 370 - protein, 434 aa, Silicibacter pomeroyi
MTEFFADIAPVRYEGPDSANPLAFRHYDPDEMVMGKRMEDHLRFAVAYWHSFAWEGGDPFGGQTLIRPWHPQDDMTRAKVKADAAFEMFDILGVPYFCWHDADIRPEAATFAESLRNFEEIIDHFLAKMESRRTRLLWGTANMFSHRRWMAGASTNPDPDVFAYAAATVKTCLDATQRMGGQNYVLWGGREGYETLLNTDMGRELDHMGRFLSMVVDYKHKIGFKGAILVEPKPQEPSKHQYDFDAATCIGFLRKYGLEGEVKLNLEQGHAILAGHSFEHEIAVAASEGMLGSIDMNRNDYQSGWDTDQFPNNVPEVALCYYHILRAGGFTTGGTNFDAKLRRQSLDATDLIAAHVGGMDICARGLKAAAAMIEDGGLETALRDRYAGWDSDHGQGILESDLDSLFARVLAGEIDPQPHSGRQEMLENHVNRFV

SEQ ID NO: 371 - protein, 445 aa, Xanthomonas oryzae; identical to SEQ ID NO: 245

SEQ ID NO: 372 - protein, 439 aa, Thermoanaerobacterium saccharolyticum
MNKYFENVSKIKYEGPKSNNPYSFKFYNPEEVIDGKTMEEHLRFSIAYWHTFTADGTDQFGKATMQRPWNHYTDPMDIAKRRVEAAFEFFDKINAPFFCFHDRDIAPEGDTLRETNKNLDTIVAMIKDYLKTSKTKVLWGTANLFSNPRFVHGASTSCNADVFAYSAAQVKKALEITKELGRENYVFWGGREGYETLLNTDMELELDNFARFLHMAVDYAKEIGFEGQFLIEPKPKEPTKHQYDFDVANVLAFLRKYDLDKYFKVNIEANHATLAFHDFQHELRYARINGVLGSIDANTGDMLLGWDTDQFPTDIRMTTLAMYEVIKMGGFDKGGLNFDAKVRRASFEPEDLFLGHIAGMDAFAKGFKVAYKLVKDGVFDKFIEERYASYKEGIGADIVSGKADFKSLEKYALEHSQIVNKSGRQELLESILNQYLFAE

SEQ ID NO: 373 - protein, 440 aa, Escherichia coli; identical to SEQ ID NO: 304

SEQ ID NO: 374 - protein, 440 aa, Escherichia coli; identical to SEQ ID NO: 239

SEQ ID NO: 375 - protein, 440 aa, Escherichia coli; identical to SEQ ID NO: 248

SEQ ID NO: 376 - protein, 440 aa, Escherichia coli; identical to SEQ ID NO: 304

SEQ ID NO: 377 - protein, 440 aa, Escherichia coli; identical to SEQ ID NO: 248

SEQ ID NO: 378 - protein, 436 aa, Rhizobium etli
MSTGFFGDIQKIKYEGPDSTNPLAFRYYQPDEIVLGKRMEDHLRFAVAYWHTFTWPGGDPFGGQTFLRPWFEDTMKAAKLKADVAFEFFSLLGAPYYCFHDADVRPEGKNFAENTKNLNEIVDYFAEKQAATGTKLLWGTANLFSNRRYMSGAATNPDPDVFAFAAATVKTCIDATQKLGGENYVLWGGREGYETLLNTDLKRELDQLGRFLNLVVEYKHKIGFKGTILIEPKPQEPTKHQYDYDVATVYGFLKKHGLENEVKVNIEQGHAILAGHSFEHELALANALGIFGSIDMNRNDYQSGWDTDQFPNNVPEMALAYYHVLAGGGFKTGGTNFDSKLRRQSLDPADLLIGHIGGMDCCARGLKAAAKMIEDKALSQPLADRYAGWESVEAQKLFRGEYSLDEIANWVESKDVNPQPKSGKQELLENVVNRYV

SEQ ID NO: 379 - protein, 440 aa, Escherichia coli; identical to SEQ ID NO: 307

SEQ ID NO: 380 - protein, 479 aa, Hordeum vulgare
MKGGELLVLLLASSLCLSAAVAAQETCPADIGAKCTDAASDDWEGEFFPGIDKINYEGPTSKKPLSYKWYNAEEVILGKKMKDWFRFSVAFWHTFRGTGGDPFGAPTKNWPWEDGTNSLAMAKRRMKAHFEFMEKLGVERWCFHDRDIAPDGKTLAETNANLDEIVELAKQLQSETNIKPLWGTAQLFMHPRYMHGAATSPEVKVYAYAAAQVKKALEVTHYLGGENYVFWGGREGYQTLLNTDMKRELEHLANFLQAAVNHKKKIGFNGTLLIEPKPQEPTKHQYDWDVATTFSFLQKFGLTGEFKINVECNHATLSGHSCHHELETARINDILGNIDANTGDPQVGWDTDEFLTDISEATLIMSSVVKNDGLAPGGFNFYAKLRRESTDVEDLFIAHISGMDTMARGRRNVVKLIEDGSLDELVRKRYQSFDTEIGAMIEAGKGDFETLEKKALEWGEPTVPSGKQELAEMLFQSAL

SEQ ID NO: 381 - protein, 434 aa, Dinoroseobacter shibae
MSDFFAGIPAVTYEGPEARSDFAFRHYNPDEMVMGKRMEDQLRFAVAWWHSFAWEGGDPFGGPTFQRPWFGDTLDHARAKADAAFEMFRILNVPFYCFHDADIRPEGASFAETTANLEAMVDYLGQKQEASGKRLLWGTANLFSHRRYMAGAATNPDPDVFAYAAATIKTCMDATHKLGGANYVLWGGREGYETLLNTDLGREREQAGRMLQMVVDYKHKIGFEGTILLEPKPQEPTKHQYDYDVATVFSFLSEFGLQDEVKMNIEQGHAILAGHSFEHELALAREFGILGSIDMNRNDYQSGWDTDQFPNNIPEVALAYYEILRAGGFDTGGTNFDSKLRRQSLDPADLIAAHVAAMDVCAAGLKAAARMLEDGELEQRREDRYAGWRAPSAEAMLNGGKLEDCFAHVMETGLDPQPVSGGQERLEALVARYL

SEQ ID NO: 382 - protein, 433 aa, Rhodobacter sphaeroides
MTDFFAGIPQIRYEGEGSSNEFAFRHYNPDEVILGKRMEDHLRFAVAWWHSFAWPGGDPFGGQTFDRPWFGDTLDLAKLKADVAFEMFDILGAPFFCFHDADIRPEGATFAESKRNLEEIVDHIGIRMEGSKTKLLWGTANLFSHRRFMSGAATNPDPDVFAWSAATVKGCMDATMKLGGANYVLWGGREGYETLLNTDLTREAENAGRFLQMVVDYKHKIGFQGTILIEPKPQEPSKHQYDYDVATVYGFLKRFGLEKEVKLNIEQGHAILAGHSFEHELALAASLGILGSIDMNRNDYQSGWDTDQFPHNHPEMALAYYEILRAGGFTTGGTNFDAKIRRQSLDPEDLVLAHVGGMDTCARALKAAARLYEDGSLETARAARYAGWETPEAQAMLASSLEKIEARVLAEGINPEPRSGRQERLENLWNRFV

SEQ ID NO: 383 - protein, 437 aa, Actinobacillus succinogenes
MTNYFDKIEKVNYEGADSINPFAYKYYNANEVILGKTMADHLRLAVCYWHTFCWNGNDMFGVGSLDRSWQKQTDPLAGAKQKADIAFEFLTKLGVPYYCFHDVDIAPEGNSYQEYVNNFNTIVDVLEQKQAETGIKLLWGTANCFTNPRYMSGAATNPNPEIFARAGAQVFNAMNATKRLGGENYVLWGGREGYETLLNTDLRREREQIGRFMQMVVEHKHKIGFKGTLLIEPKPQEPTKHQYDYDVATVYGFLKQFGLEKEIKVNIEANHATLAGHTFQHEIATAAALDILGSIDANRGDPQLGWDTDQFPNSVEENTLAIYEILKAGGLTTGGLNFDAKIRRQSIDPYDLFHAHIGAIDVLALSLRRAAKMLEDQTLQHIVEQRYAGWNGELGQQILNGKSSLEALAQAAQHLEPQPVSGQQEYLENLVNSYIYR

SEQ ID NO: 384 - protein, 445 aa, Bacillus pumilus
MANSNMKTLHSLEGIGKIQFEGKQSKNPLAFKSYNPSEVIGGKTMKDHLRFSVAYWHTLTADGTDMFGTGTMQRAWDSYSGMDLAKARLEVAFQLFDLLDVPYFSFHDRDIAPEGDTLQETNQHLDIILERMKEYMRDSGVKLLWNTANMFKHPRFVHGAATSCHADVFAYAAAQVKKGIETAKELRAENYVFWGGREGYDTLLNTDMKRELDHMASFLHMAVDYAKEIGYTGQFLIEPKPKEPTTHQYDADAATSIAFLKQYGLDTHFKLNIEANHATLAGHTFEHELRVARIHGLLGSVDANQGNTLLGWDTDEFPTDLYATTLAMYEILQNGGLGTGGLNFDAKVRRASFELEDILYAHIAGMDAFAKGLRVAHRLIEDRVFEDVIKHRYRSFSEGIGRDISEGKANFHILEEYALKHPLIRNESGREEQLKARLNQYLLED

SEQ ID NO: 385 - protein, 440 aa, Escherichia coli; identical to SEQ ID NO: 248

SEQ ID NO: 386 - protein, 438 aa, Pseudomonas syringae
MSYFPTVDKVIYEGPDSDSPLAFRHYDADKRVLGKPMREHLRMAACYWHTFVWPGADMFGVGTFKRPWQRAGDPMELAIGKAEAAFEFFSKLGIDYYSFHDTDVAPEGSSIKEYRNNFAQMVDRLERHQEQSGIKLLWGTANCFSNPRFAAGAASNPDPEVFAYAGAQVFSAMNATQRLKGSNYVLWGGREGYETLLNTDLKREREQLGRFMRMVVEHKHKIGFKGDLLIEPKPQEPTKHQYDYDSATVFGFLHQYGLQDEIKVNIEANHATLAGHSFHHEIATAVSLGIFGSIDANRGDPQNGWDTDQFPNSVEEMTLATYEILKAGGFTHGGYNFDSKVRRQSLDDVDLFHGHVAAMDVLALSLERAAAMVQNDKLQQFKDQRYAGWQQPFGQSVLSGGFSLASLAEHAFANELNPQAVSGRQELLEGVVNRFIYT

SEQ ID NO: 387 - protein, 440 aa, Burkholderia vietnamiensis
MSYFEHIPAIRYEGPQSDNPLAYHHYDPAKRVLGKTLAEHLRIAVCYWHTFVWPGHDMFGQGTFVRPWQQPGDPLERARMKADAAFEFFSKLGTPFYTFHDTDVAPEGDNLREYTANFARMVDYLGERQQASGVRLLWGTANLFSHPRFAAGAATNPNPDVFAWAATQVRHALDATHRLGGENYVLWGGREGYETLLNTDLKRERDQFARFLSMVVEHKHRIGFNGALLIEPKPQEPTKHQYDYDVATVHGFLVQYGLQDEIRVNIEANHATLAGHSFHHEIANAFALGVFGSVDANRGDPQNGWDTDQFPNSVEELTLAFYEILRHGGFTTGGMNFDAKVRRQSVAAEDLFYGHVGAIDVLALALERAAVLVENDRLDALRRQRYAQWDDAFGRKILSGGYTLQSLADDALARGVNPQHVSGAQERLENIVNQAIYALR

SEQ ID NO: 388 - protein, 440 aa, Escherichia coli; identical to SEQ ID NO: 304

SEQ ID NO: 389 - protein, 439 aa, Haemophilus influenzae; identical to SEQ ID NO: 285

SEQ ID NO: 390 - protein, 439 aa, Haemophilus influenzae
MTTYFDKIEKISFEGEKSTNPFAFKHYDANQVILGKTMAEHLRLAVCYWHTFCWNGNDMFGLGSLERSWQKNPNVLAGAEQKADIAFEFLNKLGVPYYCFHDVDIAPEGNSVREYVQNFHHIVDILERKQVETGVKLLWGTANCFTNPRYMSGAATNPNPEVFAWAATQVFNAMNATQRLGGENYVLWGGREGYETLLNTDLKREREQIGRFMQMVVEHKHKIGFKGTLLIEPKPQEPTKHQYDYDVATVYGFLKQFGLEKEIKVNIEANHATLAGHTFQHEIATACALDIFGSIDANRGDPQLGWDTDQFPNSVEENTLVMYEILKHGGFTTGGFNFDAKIRRQSIDPYDLFYAHIGAIDVLALSLKRAAKMLQEKTLQKIVNARYAGWNSELGQHILQGKTSLETLAQLVQQKDLAPKPVSGQQEYLENLVNQVIYS

SEQ ID NO: 391 - protein, 435 aa, Listeria welshimeri
MTYFKQIEKINYEGVQSGNRFAFRHYNPEEVVLGKSMKEHLRFAVAYWHTMTQDGSDPFGAATNVRDVSGKTEMELARNRVEMFFEILEKLGVEYFCFHDVDIAPEGNSLQEFMRNLDEITDLIQDKMKQTGIKLLWNTANLFTHPRFLNGAASTNNADVYAFSAAQIKKGLDISKKLGGKNYVFWGGREGYESLLNTDMEFEQANMARMYKMAIRYANEIEHEVQFLIEPKPKEPTKHQYDFDAATTMAFLQKYGLENDFKLNLEANHATLAGHTFEHELNVARTYNALGSIDANQGDLLLGWDTDEFPTNIYDTTLTMYEILQNGGIAPGGINFDAKVRRTSFEMEDLLLAHIAGMDTYARGLKAAAKLTEDHFFDKIKEERYRSFKKGIGARILDNQEDFKSLTEYALAHDSIQNESSHIEYVKSRLNDYLV

SEQ ID NO: 392 - protein, 438 aa, Thermoanaerobacter yonseiensis
MEYFKNVPKVQYEGPKSNNPYAFKFYNPDEIIDGKPLKEHLRFAVAYWHTFTGTGTDPFGASTMQRPWDRFSDPMDIAKARVEAAFEFFEKLDVPFFCFHDRDIAPEGDNLRETNKNLGTIVAMIKDYLKTSKAKVLWGTANLFSHPRYVHGAATSCNADVFAYAAAQVKKALEITKELGGQNYVFWGGREGYETLLNTDTELELDNLARFLHMAVEYAKEIGFEGQLLIEPKPKEPTKHQYDFDAAHVYAFLKKYGLDKYFKLNIEVNHATLAGHEFQHELRYARINNILGSIDANMRDMLLGWDTDQFPTDIRMTTLAMYEVIKMGGFDKGGLNFDAKVRRASFEPEDLFIAHIAGMDAFAKGFKVAYRLVKDGVFDKFIEERYKSYKEGIGAEIVSGRANFKTLEEYALNNPKIENKSGKQELLESILNQYLFTE

SEQ ID NO: 393 - protein, 445 aa, Geobacillus kaustophilus
MAYFPNIGTIPYEGPESRNPLAFKFYNPDEKVGGKTMEEHLRFSVAYWHTFTGDGSDPFGVGNMIRPWNTYSGMDLAKARVEAAFELFEKLNVPFFCFHDVDIAPEGETLSETYKNLDEIVDMIEEYMKTSKTKLLWNTANLFSHPRFVHGAATSCNADVFAYAAAKVKKGLEIAKRLGAENYVFWGGREGYETLLNTDMKLELDNLARFLHMAVDYAKEIGFDGQFLIEPKPKEPTKHQYDFDVATALAFLQTYGLKDHFKFNIEANHATLAGHTFEHELRVARIHGMLGSVDANQGDTLLGWDTDEFPTDLYTTTLAMYEILQNGGLGRGGLNFDAKVRRGSFEPEDLFYAHIAGMDSFAIGLKVAHRLLEDRVFEQFIEERYKSYTEGIGREIVEGTADFKKLEEYALQLGDIRNTSGRLERLKTLLNQYLLEVSAPSGSRS

SEQ ID NO: 394 - protein, 437 aa, Mannheimia succiniciproducens
MTNYFDKIEKVKYEGADSTNPFAYKHYNANEVILGKTMAEHLRLAVCYWHTFCWNGNDMFGVGSLDRSWQKMSDPLAAAKQKADIAFEFLTKLGVPYYCFHDVDIAPEGNSYQEYVRNFNTIVDILEQKQAESGVKLLWGTANCFSNPRYMSGAATNPNPEIFTRAAAQVFNAMNATKRLGGENYVLWGGREGYETLLNTDLRREREQIGRFMQMVVEHKHKIGFSGTLLIEPKPQEPTKHQYDYDVATVYGFLKQFGLEKEIKVNIEANHATLAGHTFQHEIATAAALDILGSIDANRGDPQLGWDTDQFPNSVEENTLAIYEILKAGGLTTGGFNFDAKIRRQSINPYDLFHGHIGAIDVLALSLKRAAKMVEDHTLQNIVDQRYAGWNGELGQQILAGKSSLEALAQAAQNLDPNPVSGQQEYIENLVNGYIYR

SEQ ID NO: 395 - DNA, 1182 bp, artificial sequence
  codon optimized coding region of Actinoplanes missouriensis xylose isomerase for expression in Zymomonas
atgagtgtccaagctacacgcgaagataaatttagctttggcttgtggacagttgggtggcaggcccgtgacgcctttggtgatgccacgcgtaccgcccttgatccggtcgaagcagttcataaacttgccgaaatcggagcctatggcattacatttcatgatgatgacttggtccccttcggttcggatgctcagacacgggatggtatcattgctggtttcaaaaaagcccttgatgaaaccggtttgatcgttcctatggttaccacaaatttgtttacgcatccggtttttaaagacggcgggtttacctctaacgatcgttctgtgcgccggtatgctatccggaaagttttgagacagatggatcttggtgcggaactgggggccaaaacgcttgtcttatggggcggcagagaaggtgcggaatatgattcagcaaaagatgttagtgccgccttggatcgttatcgcgaagcactgaatcttctggcacaatatagcgaagacagaggctatggacttcgttttgcaattgaaccgaaacctaatgaaccacgtggcgatattctgctgcctaccgcaggccatgctattgcctttgtgcaagaattagaacggcccgaactttttggcatcaatccagaaaccgggcatgaacagatgtcaaacttgaattttacccaggggattgctcaggctttgtggcataaaaaactttttcatattgatttgaatggacaacatggtcccaagtttgatcaggaccttgtctttggtcatggtgaccttttaaatgcctttagcctggtcgatttgttagaaaatggtccagatggtgccccggcttatgatggcccgcgccattttgattataaaccatctcgtactgaagattatgatggcgtttgggaatcagcgaaagccaatatccgtatgtatcttttattaaaagaacgtgccaaagcgtttagagctgatccggaagttcaggaagcactggcagcaagcaaagttgccgaattgaaaaccccaacgttgaatcctggtgaaggctatgcagaactgttagcagatcgcagtgcttttgaagattatgatgccgatgctgttggtgcgaaaggttttggtttcgtgaaattgaaccaattggccattgaacatttattaggtgcccgc

SEQ ID NO: 396 - DNA, 1347 bp, artificial sequence
  codon optimized coding region of Lactobacillus brevis xylose isomerase for expression in Zymomonas
atgaccgaagaatattggaaaggagtggacaaaattcagtatgttggtcatcaggacaaaaagtccggtctggggtttcaatattataatccggaagaagaaattatgggaaaaaagatgaaagactggttgcgtttcgccgttgcttattggcatacctttgatcaacgcttggttgatccatttggtgatggcaccgcccagcgcccgtatgacaagtatacagatcctatggatttggctctggctaaagttgatgctgcttttgaattttatcagaaattaggagtggattatttatgcttccatgatcgtgatttggctcctgaaggtgatacactgcgcgaaacaaacgctaatctggataaggttgttgataaaattgtggaatatcagaaaacaagcggaatgaaagttctttggaatacctctaatatgtttacgaaccccagattcgtcgaaggtgctgctacctccccctatgccgatgtcttcgcatatagcgctgcacaacttaagcattctctggaaattggtaagcgcgtcggttcggaaaattatgttttctggggcggaagagaaggttatgaatctttgtggaatacgaatatgaagcaagaacaagaacatgccgcgaaaatttttcatatggcaaaggattatgcaaatgaaatcggctttgatgcgcaaatgctgttagaacctaaaccgaaagaaccgaccacccatcaatatgatttcgatgccgctacaacgattgccttcatgaaagaatatgatttagataaagatttcaaattgaatttggaaggcaatcatgctaatctggcaggacatacctatcaacatgaaattcgggttgcccgcgaagctggcctgctggggtcgttagatgctaatcagggagataaattaattggttgggatatcgatgaatatcctagcaatttgtatgaaacgaccgctgctatgtatgaagttgtcgaaaacggatcaatcggcccgcgtggtggcttaaattttgatgccaaaccccgccgtagcagttttgcccctgaagacttgtttttgggtcatattgttggcatggattcttttgccgccggtttgcgtgtcgccgctgctatgaaacaggatggctttttagattctttgaaagcggaccggtatagctcttataaatctggcgttggcgccgatatcgaatcaggcaaagccgacctgaaatctcttgaagcatatgccattgataaaccgcaatctgaacttatcgcagccacgcattccgatcatttagaagaaattaaagacacaattaatcattatatcattgatactctttcaaaa

SEQ ID NO: 397 - DNA, 1320 bp, artificial sequence
  codon optimized coding region of E. coli xylose isomerase for expression in Zymomonas
atgcaggcttattttgatcagctggatcgcgtgcggtatgaaggctctaagtcaagtaatcctttagcctttcgtcattataatcctgatgaattagtgctgggtaaacgtatggaagaacatcttagatttgctgcttgctattggcataccttttgttggaatggtgcagatatgtttggggttggagcttttaatcggccttggcagcagcctggggaagcattggcccttgccaagcggaaagcggatgttgcctttgaatttttccataaattgcatgtccctttctattgctttcatgatgtcgatgtctcccctgaaggcgctagcctgaaagaatatatcaataatttcgcgcaaatggttgacgtcttagctggtaagcaggaagaaagcggcgtgaaacttttgtggggtacagcaaattgttttaccaatcctcgttatggtgcgggcgcagctaccaatccggatccggaagtttttagctgggctgccacacaagttgtcacagctatggaagctacacataaattggggggtgaaaattatgttttgtggggtggtcgtgaagggtatgaaacgttattaaatacagatctgcgccaagaacgcgaacagttgggtcgttttatgcaaatggtggttgaacataaacataaaattggcttccaggggacccttcttattgaaccgaaaccgcaagaaccgaccaagcatcaatatgattatgatgcagcgacggtttatggcttcttgaaacagtttggtttagaaaaagaaattaaacttaatattgaagccaaccatgccactcttgcgggccattcctttcatcatgaaatcgctacagccattgcgctgggattgttcggtagtgttgatgctaatcgcggcgatgcccaattgggttgggatacagatcaatttcccaattcagtcgaagaaaatgcgctggttatgtatgaaattttgaaggcaggcggatttaccactggtggtttgaattttgatgcgaaagttcgtcgccagtcaaccgataagtatgatttgttctatggacatatcggtgcgatggatactatggccttagcacttaaaattgctgcacgtatgatcgaagatggcgaacttgataaacgcattgcccaacgctattcggggtggaatagcgaattagggcagcagattttaaaaggacaaatgtcgttagcggatttagccaagtatgcccaggaacatcatctgtctccggtgcatcaatcgggtcgtcaagaacaacttgaaaatttagtgaatcattatctgtttgacaaa

SEQ ID NO: 398 - DNA, 1191 bp, Geodermatophilus obscurus
atgaccgctccgcagcctacgaaagatgatcgctttacctttggtttatggacggttggctggcaagcccgggatccttttggtgatgccacccgtcctgctctggatcccgttgaatctgtccatcggctggccgaattgggtgccgctggcgttacgtttcatgatgatgatttgattccctttggcagcgaagatgcggaacgcgccaaacatgtccagcggtttaccgatgccctggaagaaaccggtttggttgttccgatggccaccacgaatttgtttacccatccggtctttaaagaaggcgctcttacggcgaatgatcgtgatgttcgtcgctatgctttgcgcaaagtcatgcggaatatggatcttgcggccgaattaggtgcccgcacctatgttctttggggtggtcgtgaaggtgctgaagtcgattccgctaaagatctgcgtgctgcgttggatcggtatcgtgaaggtattgatacgttagcgcagtattcggaagatcgtggttatggccttcgctttgccttagaacccaaaccgaatgaacctcgcggtgatatttttctgcccaccatcggccatgctttagcgtttatctctacgctggaacatgctgatcttgttggtttaaatccggaagtcggccatgaacaaatggccaatcttaattatacgcatggtattgcccaggctctttggcaaggcaaattgtttcatatcgatctgaatggtcagcatggccctaaattcgatcaagatttggttttcggtcatggcgatttgctttctgcttttggcaccgtcgatttactggaacatggtggcccgaatggtagccctgcctatgatggcccgcgtcattttgattataaacctttgcgcaccgaagatatcgatggcgtttgggcttccgccgctgcgaatatgcgtacgtatttgcttctgaaagaacgggccgctgcgtttcgtgcggatccggaagttcaggaagccttggctgctgctcgggtccccgaattggctcaaccgacccttgcggatggcgaaacgtatgaagatctgttggccgatcgtgccgcttttgaagaatttgatgctgaagctgctggtgctcgtcctggtggtcaggttcgcctgagccaattggctgtcgaacatcttttaggtgcccgttaa

SEQ ID NO: 399 - DNA, 1224 bp, Mycobacterium smegmatis
atgaccgttttggaatccaatgtctcgaccacggaaccccttacgccgaaacgcgaagatcggtttagctttggtttatggaccattggttggaatggcaatgatccttttggtgttgctacgcgcccggctctggatgttgtcgaagcggtcgaaaaactggcggaattgggtgcctatggcttaacctttcatgatgatgatctgtttgcctttggttctagcgataccgaacgtcgccggatggttgatcgtctgacgtctgcgttgagcgccaatggcatggttgtcccgatggttaccacgaatctttttacccagcctgtctttaaagatggtggctttacctccaatgatcgcacggttcgtcgctttgctcttcgtaaagtcttacgcaatattgatctggccatcgaattgggtgctgaaacgtttgttttgtggggtggccgggaaggctccgaatatgattcggccaaagatgtccaagccgctcttgcgcggtatcgtgaagctatggatttgctttgtcagtatgttattgatcaaggttctggcttgcgttttgctatcgaaccgaaacctaatgaacctcgcggtgatattttactgcccaccgtcggccatgcgttagcctttatcgatacgctggcccgtccggaaatggttggtgtcaatcctgaaaccggccatgaacagatgtctggtttaaattttatgcacggcattgctcaagcgctttatagcggtaaattgttccatatcgatctgaatggtcagcgtggcatcaaattcgatcaagatttggttttcggtcatggcgatttggccaatgcttttgcgcttgtcgatttgcttgaacatggtggccctgatggcacccccgcttatgaaggcccccgccattttgattataaaccttcccggacggaagatatcgatggcgtttgggcctcggcggccgctaatatgcgcatgtatttactgttgaaacagcgggccgaagcctttcgtgctgatcctgctgttcgtgaagctatggccgctgctaaagtcgctgaattgcgtcaaccgacccttgctcctggtgaaacgtatcatgatcttttagctgatcgctctgcgtttgaagaatttgatagcgaagcctattttggtggcaaaggttgcggctttgtcgctcttcagcaattagcgatcgaacatttgatgggcgcccgttaa
